(19) United States
(12) Patent Application Publication
(10) Pub. No.: US 2005/0209179 A1
(43) Pub. Date: Sep. 22, 2005

(54) RNA interference mediated treatment of Alzheimer's disease using short interfering nucleic acid (siNA)

(75) Inventors: James McSwiggen, Boulder, CO (US); Leonid Beigelman, Longmont, CO (US)

Correspondence Address: MCDONNELL BOEHNEN HULBERT & BERGHOFF LLP, 300 S. WACKER DRIVE, 32ND FLOOR, CHICAGO, IL, 60606, US

(73) Assignee: Sirna Therapeutics, Inc., Boulder, CO (US)

(21) Appl. No.: 10/877,889

(22) Filed: Jun. 25, 2004

Related U.S. Application Data
(63) Continuation-in-part of application No. 10/607,933, filed on Jun. 27, 2003.
Application No. 10/607,933 is a continuation-in-part of application No. 09/930,423, filed on Aug. 15, 2001, now abandoned.
Application No. 10/607,933 is a continuation-in-part of application No. PCT/US03/04710, filed on Feb. 18, 2003.
Application No. PCT/US03/04710 is a continuation-in-part of application No. 10/205,309, filed on Jul. 25, 2002.
(63) Continuation-in-part of application No. PCT/US04/16390, filed on May 24, 2004.
Application No. PCT/US04/16390 is a continuation-in-part of application No. 10/826,966, filed on Apr. 16, 2004.
Application No. 10/826,966 is a continuation-in-part of application No. 10/757,803, filed on Jan. 14, 2004.
Application No. 10/757,803 is a continuation-in-part of application No. 10/720,448, filed on Nov. 24, 2003.
Application No. 10/720,448 is a continuation-in-part of application No. 10/693,059, filed on Oct. 23, 2003.
Application No. 10/693,059 is a continuation-in-part of application No. 10/444,853, filed on May 23, 2003.
Application No. 10/444,853 is a continuation-in-part of application No. PCT/US03/05346, filed on Feb. 20, 2003.
Application No. 10/444,853 is a continuation-in-part of application No. PCT/US03/05028, filed on Feb. 20, 2003.
(63) Continuation-in-part of application No. PCT/US04/13456, filed on Apr. 30, 2004.
Application No. PCT/US04/13456 is a continuation-in-part of application No. 10/780,447, filed on Feb. 13, 2004.
Application No. PCT/US04/13456 is a continuation-in-part of application No. 10/427,160, filed on Apr. 30, 2003.
Application No. 10/427,160 is a continuation-in-part of application No. PCT/US02/15876, filed on May 17, 2002.
(63) Continuation-in-part of application No. 10/727,780, filed on Dec. 3, 2003.
(60) Provisional application No. 60/358,580, filed on Feb. 20, 2002.
(60) Provisional application No. 60/363,124, filed on Mar. 11, 2002.
(60) Provisional application No. 60/386,782, filed on Jun. 6, 2002.
(60) Provisional application No. 60/406,784, filed on Aug. 29, 2002.
(60) Provisional application No. 60/408,378, filed on Sep. 5, 2002.
(60) Provisional application No. 60/409,293, filed on Sep. 9, 2002.
(60) Provisional application No. 60/440,129, filed on Jan. 15, 2003.
(60) Provisional application No. 60/362,016, filed on Mar. 6, 2002.
(60) Provisional application No. 60/292,217, filed on May 18, 2001.
(60) Provisional application No. 60/306,883, filed on Jul. 20, 2001.
(60) Provisional application No. 60/311,865, filed on Aug. 13, 2001.
(60) Provisional application No. 60/543,480, filed on Feb. 10, 2004.

(51) Int. Cl. A61K 48/00; C07H 21/02

(52) U.S. Cl. 514/44; 536/23.1

(57) ABSTRACT

This invention relates to compounds, compositions, and methods useful for modulating beta-secretase (BACE), amyloid precurson protein (APP), PIN-1, presenillin 1 (PS-1) and/or presenillin 2 (PS-2) gene expression using short interfering nucleic acid (siNA) molecules. This invention also relates to compounds, compositions, and methods useful for modulating the expression and activity of other genes involved in pathways of BACE, APP, PIN-1, PS-1 and/or PS-2 gene expression and/or activity by RNA interference (RNAi) using small nucleic acid molecules. In particular, the instant invention features small nucleic acid molecules, such as short interfering nucleic acid (siNA), short interfering RNA (siRNA), double-stranded RNA (dsRNA), micro-RNA (mRNA), and short hairpin RNA (shRNA) molecules and methods used to modulate the expression of BACE, APP, PIN-1, PS-1 and/or PS-2 genes.

[0001] This application is a continuation-in-part of U.S. patent application Ser. No. 10/607,933, filed Jun. 27, 2003, which is a continuation-in-part of U.S. patent application Ser. No. 09/930,423, filed Aug. 15, 2001 and is also a continuation-in-part of International Patent Application No. PCT/US03/04710, filed Feb. 18, 2003, which is a continuation-in-part of U.S. patent application Ser. No. 10/205,309, filed Jul. 25, 2002. This application is also a continuation-in-part of International Patent Application No. PCT/US04/16390, filed May 24, 2004, which is a continuation-in-part of U.S. patent application Ser. No. 10/826,966, filed Apr. 16, 2004, which is continuation-in-part of U.S. patent application Ser. No. 10/757,803, filed Jan. 14, 2004, which is a continuation-in-part of U.S. patent application Ser. No. 10/720,448, filed Nov. 24, 2003, which is a continuation-in-part of U.S. patent application Ser. No. 10/693,059, filed Oct. 23, 2003, which is a continuation-in-part of U.S. patent application Ser. No. 10/444,853, filed May 23, 2003, which is a continuation-in-part of International Patent Application No. PCT/US03/05346, filed Feb. 20, 2003, and a continuation-in-part of International Patent Application No. PCT/US03/05028, filed Feb. 20, 2003, both of which claim the benefit of U.S. Provisional Application No. 60/358,580, filed Feb. 20, 2002, U.S. Provisional Application No. 60/363,124, filed Mar. 11, 2002, U.S. Provisional Application No. 60/386,782, filed Jun. 6, 2002, U.S. Provisional Application No. 60/406,784, filed Aug. 29, 2002, U.S. Provisional Application No. 60/408,378, filed Sep. 5, 2002, U.S. Provisional Application No. 60/409,293, filed Sep. 9, 2002, and U.S. Provisional Application No. 60/440,129, filed Jan. 15, 2003. This application is also a continuation-in-part of International Patent Application No. PCT/US04/13456, filed Apr. 30, 2004, which is a continuation of patent application Ser. No. 10/780,447, filed Feb. 13, 2004, which is a continuation-in-part of U.S. patent application Ser. No. 10/427,160, filed Apr. 30, 2003, which is a continuation-in-part of International Patent Application No. PCT/US02/15876, filed May 17, 2002, which claims the benefit of U.S. Provisional Application No. 60/362,016, filed Mar. 6, 2002, and U.S. Provisional Application No. 60/292,217, filed May 18, 2001. This application is also a continuation-in-part of U.S. patent application Ser. No. 10/727,780, filed Dec. 3, 2003. This application also claims the benefit of U.S. Provisional Application No. 60/543,480, filed Feb. 10, 2004. The instant application claims the benefit of all the listed applications, which are hereby incorporated by reference herein in their entireties, including the drawings.

### FIELD OF THE INVENTION

[0002] The present invention relates to compounds, compositions, and methods for the study, diagnosis, and treatment of traits, diseases and conditions associated with Alzheimer's disease. The present invention is also directed to compounds, compositions, and methods relating to traits, diseases and conditions that respond to the modulation of expression and/or activity of genes involved in beta-secretase (BACE), amyloid precursor protein (APP), PIN-1, presenillin 1 (PS-1) and/or presenillin 2 (PS-2) gene expression pathways or other cellular processes that mediate the maintenance or development of such traits, diseases and conditions. Specifically, the invention relates to small nucleic acid molecules, such as short interfering nucleic acid (siNA), short interfering RNA (siRNA), double-stranded RNA (dsRNA), micro-RNA (mRNA), and short hairpin RNA (shRNA) molecules capable of mediating RNA interference (RNAi) against beta-secretase (BACE), amyloid precursor protein (APP), PIN-1, presenillin 1 (PS-1) and/or presenillin 2 (PS-2) gene expression. Such small nucleic acid molecules are useful, for example, in providing compositions for treatment of traits, diseases and conditions that can respond to modulation of beta-secretase (BACE), amyloid precursor protein (APP), PIN-1, presenillin 1 (PS-1) and/or presenillin 2 (PS-2) gene expression in a subject, such as Alzheimer's disease or dementia.

### BACKGROUND OF THE INVENTION

[0003] The following is a discussion of relevant art pertaining to RNAi. The discussion is provided only for understanding of the invention that follows. The summary is not an admission that any of the work described below is prior art to the claimed invention.

[0004] RNA interference refers to the process of sequence-specific post-transcriptional gene silencing in animals mediated by short interfering RNAs (siRNAs) (Zamore et al., 2000, Cell, 101, 25-33; Fire et al., 1998, Nature, 391, 806; Hamilton et al., 1999, Science, 286, 950-951; Lin et al., 1999, Nature, 402, 128-129; Sharp, 1999, Genes & Dev., 13:139-141; and Strauss, 1999, Science, 286, 886). The corresponding process in plants (Heifetz et al., International PCT Publication No. WO 99/61631) is commonly referred to as post-transcriptional gene silencing or RNA silencing and is also referred to as quelling in fungi. The process of post-transcriptional gene silencing is thought to be an evolutionarily-conserved cellular defense mechanism used to prevent the expression of foreign genes and is commonly shared by diverse flora and phyla (Fire et al., 1999, Trends Genet., 15, 358). Such protection from foreign gene expression may have evolved in response to the production of double-stranded RNAs (dsRNAs) derived from viral infection or from the random integration of transposon elements into a host genome via a cellular response that specifically destroys homologous single-stranded RNA or viral genomic RNA. The presence of dsRNA in cells triggers the RNAi response through a mechanism that has yet to be fully characterized. This mechanism appears to be different from other known mechanisms involving double stranded RNA-specific ribonucleases, such as the interferon response that results from dsRNA-mediated activation of protein kinase PKR and 2′,5′-oligoadenylate synthetase resulting in non-specific cleavage of mRNA by ribonuclease L (see for example U.S. Pat. Nos. 6,107,094; 5,898,031; Clemens et al., 1997, J. Interferon & Cytokine Res., 17, 503-524; Adah et al., 2001, Curr. Med. Chem., 8, 1189).

[0005] The presence of long dsRNAs in cells stimulates the activity of a ribonuclease III enzyme referred to as dicer (Bass, 2000, Cell, 101, 235; Zamore et al., 2000, Cell, 101, 25-33; Hammond et al., 2000, Nature, 404, 293). Dicer is involved in the processing of the dsRNA into short pieces of dsRNA known as short interfering RNAs (siRNAs) (Zamore et al., 2000, Cell, 101, 25-33; Bass, 2000, Cell, 101, 235; Berstein et al., 2001, Nature, 409, 363). Short interfering RNAs derived from dicer activity are typically about 21 to about 23 nucleotides in length and comprise about 19 base pair duplexes (Zamore et al., 2000, Cell, 101, 25-33; Elbashir et al., 2001, Genes Dev., 15, 188). Dicer has also been implicated in the excision of 21- and 22-nucleotide small temporal RNAs (stRNAs) from precursor RNA of conserved structure that are implicated in translational control (Hutvagner et al., 2001, Science, 293, 834). The RNAi response also features an endonuclease complex, commonly referred to as an RNA-induced silencing complex (RISC), which mediates cleavage of single-stranded RNA having sequence complementary to the antisense strand of the siRNA duplex. Cleavage of the target RNA takes place in the middle of the region complementary to the antisense strand of the siRNA duplex (Elbashir et al., 2001, Genes Dev., 15, 188).

[0006] RNAi has been studied in a variety of systems. Fire et al., 1998, Nature, 391, 806, were the first to observe RNAi in C. elegans. Bahramian and Zarbl, 1999, Molecular and Cellular Biology, 19, 274-283 and Wianny and Goetz, 1999, Nature Cell Biol., 2, 70, describe RNAi mediated by dsRNA in mammalian systems. Hammond et al., 2000, Nature, 404, 293, describe RNAi in Drosophila cells transfected with dsRNA. Elbashir et al., 2001, Nature, 411, 494 and Tuschl et al., International PCT Publication No. WO 01/75164, describe RNAi induced by introduction of duplexes of synthetic 21-nucleotide RNAs in cultured mammalian cells including human embryonic kidney and HeLa cells. Recent work in Drosophila embryonic lysates (Elbashir et al., 2001, EMBO J., 20, 6877 and Tuschl et al., International PCT Publication No. WO 01/75164) has revealed certain requirements for siRNA length, structure, chemical composition, and sequence that are essential to mediate efficient RNAi activity. These studies have shown that 21-nucleotide siRNA duplexes are most active when containing 3′-terminal dinucleotide overhangs. Furthermore, complete substitution of one or both siRNA strands with 2′-deoxy (2′-H) or 2′-O-methyl nucleotides abolishes RNAi activity, whereas substitution of the 3′-terminal siRNA overhang nucleotides with 2′-deoxy nucleotides (2′-H) was shown to be tolerated. Single mismatch sequences in the center of the siRNA duplex were also shown to abolish RNAi activity. In addition, these studies also indicate that the position of the cleavage site in the target RNA is defined by the 5′-end of the siRNA guide sequence rather than the 3′-end of the guide sequence (Elbashir et al., 2001, EMBO J., 20, 6877). Other studies have indicated that a 5′-phosphate on the target-complementary strand of a siRNA duplex is required for siRNA activity and that ATP is utilized to maintain the 5′-phosphate moiety on the siRNA (Nykanen et al., 2001, Cell, 107, 309).

[0007] Studies have shown that replacing the 3′-terminal nucleotide overhanging segments of a 21-mer siRNA duplex having two-nucleotide 3′-overhangs with deoxyribonucleotides does not have an adverse effect on RNAi activity. Replacing up to four nucleotides on each end of the siRNA with deoxyribonucleotides has been reported to be well tolerated, whereas complete substitution with deoxyribonucleotides results in no RNAi activity (Elbashir et al., 2001, EMBO J., 20, 6877 and Tuschl et al., International PCT Publication No. WO 01/75164). In addition, Elbashir et al., supra, also report that substitution of siRNA with 2′-O-methyl nucleotides completely abolishes RNAi activity. Li et al., International PCT Publication No. WO 00/44914, and Beach et al., International PCT Publication No. WO 01/68836 preliminarily suggest that siRNA may include modifications to either the phosphate-sugar backbone or the nucleoside to include at least one of a nitrogen or sulfur heteroatom, however, neither application postulates to what extent such modifications would be tolerated in siRNA molecules, nor provides any further guidance or examples of such modified siRNA. Kreutzer et al., Canadian Patent Application No. 2,359,180, also describe certain chemical modifications for use in dsRNA constructs in order to counteract activation of double-stranded RNA-dependent protein kinase PKR, specifically 2′-amino or 2′-O-methyl nucleotides, and nucleotides containing a 2′-O or 4′-C methylene bridge. However, Kreutzer et al. similarly fails to provide examples or guidance as to what extent these modifications would be tolerated in dsRNA molecules.

[0008] Parrish et al., 2000, Molecular Cell, 6, 1077-1087, tested certain chemical modifications targeting the unc-22 gene in C. elegans using long (>25 nt) siRNA transcripts. The authors describe the introduction of thiophosphate residues into these siRNA transcripts by incorporating thiophosphate nucleotide analogs with T7 and T3 RNA polymerase and observed that RNAs with two phosphorothioate modified bases also had substantial decreases in effectiveness as RNAi. Further, Parrish et al. reported that phosphorothioate modification of more than two residues greatly destabilized the RNAs in vitro such that interference activities could not be assayed. Id. at 1081. The authors also tested certain modifications at the 2′-position of the nucleotide sugar in the long siRNA transcripts and found that substituting deoxynucleotides for ribonucleotides produced a substantial decrease in interference activity, especially in the case of Uridine to Thymidine and/or Cytidine to deoxy-Cytidine substitutions. Id. In addition, the authors tested certain base modifications, including substituting, in sense and antisense strands of the siRNA, 4-thiouracil, 5-bromouracil, 5-iodouracil, and 3-(aminoallyl)uracil for uracil, and inosine for guanosine. Whereas 4-thiouracil and 5-bromouracil substitution appeared to be tolerated, Parrish reported that inosine produced a substantial decrease in interference activity when incorporated in either strand. Parrish also reported that incorporation of 5-iodouracil and 3-(aminoallyl)uracil in the antisense strand resulted in a substantial decrease in RNAi activity as well.

[0009] The use of longer dsRNA has been described. For example, Beach et al., International PCT Publication No. WO 01/68836, describes specific methods for attenuating gene expression using endogenously-derived dsRNA. Tuschl et al., International PCT Publication No. WO 01/75164, describe a Drosophila in vitro RNAi system and the use of specific siRNA molecules for certain functional genomic and certain therapeutic applications; although Tuschl, 2001, Chem. Biochem., 2, 239-245, doubts that RNAi can be used to cure genetic diseases or viral infection due to the danger of activating interferon response. Li et al., International PCT Publication No. WO 00/44914, describe the use of specific long (141 bp-488 bp) enzymatically synthesized or vector expressed dsRNAs for attenuating the expression of certain target genes. Zemicka-Goetz et al., International PCT Publication No. WO 01/36646, describe certain methods for inhibiting the expression of particular genes in mammalian cells using certain long (550 bp-714 bp), enzymatically synthesized or vector expressed dsRNA molecules. Fire et al., International PCT Publication No. WO 99/32619, describe particular methods for introducing certain long dsRNA molecules into cells for use in inhibiting gene expression in nematodes. Plaetinck et al., International PCT Publication No. WO 00/01846, describe certain methods for identifying specific genes responsible for conferring a particular phenotype in a cell using specific long dsRNA molecules. Mello et al., International PCT Publication No. WO 01/29058, describe the identification of specific genes involved in dsRNA-mediated RNAi. Pachuck et al., International PCT Publication No. WO 00/63364, describe certain long (at least 200 nucleotide) dsRNA constructs. Deschamps Depaillette et al., International PCT Publication No. WO 99/07409, describe specific compositions consisting of particular dsRNA molecules combined with certain anti-viral agents. Waterhouse et al., International PCT Publication No. 99/53050 and 1998, PNAS, 95, 13959-13964, describe certain methods for decreasing the phenotypic expression of a nucleic acid in plant cells using certain dsRNAs. Driscoll et al., International PCT Publication No. WO 01/49844, describe specific DNA expression constructs for use in facilitating gene silencing in targeted organisms.

[0010] Others have reported on various RNAi and gene-silencing systems. For example, Parrish et al., 2000, Molecular Cell, 6, 1077-1087, describe specific chemically-modified dsRNA constructs targeting the unc-22 gene of C. elegans. Grossniklaus, International PCT Publication No. WO 01/38551, describes certain methods for regulating polycomb gene expression in plants using certain dsRNAs. Churikov et al., International PCT Publication No. WO 01/42443, describe certain methods for modifying genetic characteristics of an organism using certain dsRNAs. Cogoni et al, International PCT Publication No. WO 01/53475, describe certain methods for isolating a Neurospora silencing gene and uses thereof. Reed et al., International PCT Publication No. WO 01/68836, describe certain methods for gene silencing in plants. Honer et al., International PCT Publication No. WO 01/70944, describe certain methods of drug screening using transgenic nematodes as Parkinson's Disease models using certain dsRNAs. Deak et al., International PCT Publication No. WO 01/72774, describe certain Drosophila-derived gene products that may be related to RNAi in Drosophila. Arndt et al., International PCT Publication No. WO 01/92513 describe certain methods for mediating gene suppression by using factors that enhance RNAi. Tuschl et al., International PCT Publication No. WO 02/44321, describe certain synthetic siRNA constructs. Pachuk et al., International PCT Publication No. WO 00/63364, and Satishchandran et al., International PCT Publication No. WO 01/04313, describe certain methods and compositions for inhibiting the function of certain polynucleotide sequences using certain long (over 250 bp), vector expressed dsRNAs. Echeverri et al., International PCT Publication No. WO 02/38805, describe certain C. elegans genes identified via RNAi. Kreutzer et al., International PCT Publications Nos. WO 02/055692, WO 02/055693, and EP 1144623 B1 describes certain methods for inhibiting gene expression using dsRNA. Graham et al., International PCT Publications Nos. WO 99/49029 and WO 01/70949, and AU 4037501 describe certain vector expressed siRNA molecules. Fire et al., U.S. Pat. No. 6,506,559, describe certain methods for inhibiting gene expression in vitro using certain long dsRNA (299 bp-1033 bp) constructs that mediate RNAi. Martinez et al., 2002, Cell, 110, 563-574, describe certain single stranded siRNA constructs, including certain 5′-phosphorylated single stranded siRNAs that mediate RNA interference in Hela cells. Harborth et al., 2003, Antisense & Nucleic Acid Drug Development, 13, 83-105, describe certain chemically and structurally modified siRNA molecules. Chiu and Rana, 2003, RNA, 9, 1034-1048, describe certain chemically and structurally modified siRNA molecules. Woolf et al., International PCT Publication Nos. WO 03/064626 and WO 03/064625 describe certain chemically modified dsRNA constructs.

[0011] McSwiggen et al., International PCT Publication No. WO 01/16312, describes nucleic acid mediated inhibition of BACE, PS-1, and PS-2 expression.

### SUMMARY OF THE INVENTION

[0012] This invention relates to compounds, compositions, and methods useful for modulating the expression of genes associated with the maintenance or development of Alzheimer's disease and/or dementia, for example, beta-secretase (BACE), amyloid precursor protein (APP), PIN-1, presenillin 1 (PS-1) and/or presenillin 2 (PS-2) gene expression using short interfering nucleic acid (siNA) molecules. This invention also relates to compounds, compositions, and methods useful for modulating the expression and activity of other genes involved in pathways of BACE, APP, PIN-1, PS-1 and/or PS-2 gene expression and/or activity by RNA interference (RNAi) using small nucleic acid molecules. In particular, the instant invention features small nucleic acid molecules, such as short interfering nucleic acid (siNA), short interfering RNA (siRNA), double-stranded RNA (dsRNA), micro-RNA (miRNA), and short hairpin RNA (shRNA) molecules and methods used to modulate the expression of BACE, APP, PIN-1, PS-1 and/or PS-2 genes or other genes associated with the maintenance or development of Alzheimer's disease and/or dementia.

[0013] A siNA of the invention can be unmodified or chemically-modified. A siNA of the instant invention can be chemically synthesized, expressed from a vector or enzymatically synthesized. The instant invention also features various chemically-modified synthetic short interfering nucleic acid (siNA) molecules capable of modulating BACE, APP, PIN-1, PS-1 and/or PS-2 gene expression or activity in cells by RNA interference (RNAi). The use of chemically-modified siNA improves various properties of native siNA molecules through increased resistance to nuclease degradation in vivo and/or through improved cellular uptake. Further, contrary to earlier published studies, siNA having multiple chemical modifications retains its RNAi activity. The siNA molecules of the instant invention provide useful reagents and methods for a variety of therapeutic, diagnostic, target validation, genomic discovery, genetic engineering, and pharmacogenomic applications.

[0014] In one embodiment, the invention features one or more siNA molecules and methods that independently or in combination modulate the expression of BACE, APP, PIN-1, PS-1 and/or PS-2 genes encoding proteins, such as proteins comprising BACE, APP, PIN-1, PS-1 and/or PS-2 associated with the maintenance and/or development of Alzheimer's disease and other neurodegenerative disorders or conditions such as dementia and stroke/cardiovascular accident (CVA), such as genes encoding sequences comprising those sequences referred to by GenBank Accession Nos. shown in Table I, referred to herein generally as BACE, APP, PIN-1, PS-1 and/or PS-2. The description below of the various aspects and embodiments of the invention is provided with reference to exemplary BACE gene referred to herein as BACE. However, the various aspects and embodiments are also directed to other BACE genes, such as BACE homolog genes, transcript variants and polymorphisms (e.g., single nucleotide polymorphism, (SNPs)) associated with certain BACE genes. As such, the various aspects and embodiments are also directed to other genes which express other BACE related proteins or other proteins associated with Alzheimer's disease, such as APP, PIN-1, PS-1 and/or PS-2, including mutant genes and splice variants thereof. The various aspects and embodiments are also directed to other genes that are involved in BACE, APP, PIN-1, PS-1 and/or PS-2 mediated pathways of signal transduction or gene expression that are involved, for example, in the progression, development, or maintenance of disease (e.g., Alzheimer's disease). These additional genes can be analyzed for target sites using the methods described for BACE genes herein. Thus, the modulation of other genes and the effects of such modulation of the other genes can be performed, determined, and measured as described herein.

[0015] In one embodiment, the invention features a double-stranded short interfering nucleic acid (siNA) molecule that down-regulates expression of a BACE gene, wherein said siNA molecule comprises about 18 to about 21 base pairs.

[0016] In one embodiment, the invention features a double stranded short interfering nucleic acid (siNA) molecule that directs cleavage of BACE RNA via RNA interference (RNAi), wherein the double stranded siNA molecule comprises a first and a second strand, each strand of the siNA molecule is about 18 to about 23 nucleotides in length, the first strand of the siNA molecule comprises nucleotide sequence having sufficient complementarity to the BACE RNA for the siNA molecule to direct cleavage of the BACE RNA via RNA interference, and the second strand of said siNA molecule comprises nucleotide sequence that is complementary to the first strand.

[0017] In one embodiment, the invention features a chemically synthesized double stranded short interfering nucleic acid (siNA) molecule that directs cleavage of a BACE RNA via RNA interference (RNAi), wherein each strand of the siNA molecule is about 18 to about 23 nucleotides in length; and one strand of the siNA molecule comprises nucleotide sequence having sufficient complementarity to the BACE RNA for the siNA molecule to direct cleavage of the BACE RNA via RNA interference.

[0018] In one embodiment, the invention features a siNA molecule that down-regulates expression of a BACE gene, for example, wherein the BACE gene comprises BACE encoding sequence. In one embodiment, the invention features a siNA molecule that down-regulates expression of a BACE gene, for example, wherein the BACE gene comprises BACE non-coding sequence or regulatory elements involved in BACE gene expression.

[0019] In one embodiment, a siNA of the invention is used to inhibit the expression of BACE genes or a BACE gene family, wherein the genes or gene family sequences share sequence homology. Such homologous sequences can be identified as is known in the art, for example using sequence alignments. siNA molecules can be designed to target such homologous sequences, for example using perfectly complementary sequences or by incorporating non-canonical base pairs, for example mismatches and/or wobble base pairs, that can provide additional target sequences. In instances where mismatches are identified, non-canonical base pairs (for example, mismatches and/or wobble bases) can be used to generate siNA molecules that target more than one gene sequence. In a non-limiting example, non-canonical base pairs such as UU and CC base pairs are used to generate siNA molecules that are capable of targeting sequences for differing BACE targets that share sequence homology. As such, one advantage of using siNAs of the invention is that a single siNA can be designed to include nucleic acid sequence that is complementary to the nucleotide sequence that is conserved between the homologous genes. In this approach, a single siNA can be used to inhibit expression of more than one gene instead of using more than one siNA molecule to target the different genes.

[0020] In one embodiment, the invention features a siNA molecule having RNAi activity against BACE RNA, wherein the siNA molecule comprises a sequence complementary to any RNA having BACE encoding sequence, such as those sequences having GenBank Accession Nos. shown in Table I. In another embodiment, the invention features a siNA molecule having RNAi activity against BACE RNA, wherein the siNA molecule comprises a sequence complementary to an RNA having variant BACE encoding sequence, for example other mutant BCAE genes not shown in Table I but known in the art to be associated with the maintenance and/or development of Alzheimer's disease and/or dementia. Chemical modifications as shown in Tables III and IV or otherwise described herein can be applied to any siNA construct of the invention. In another embodiment, a siNA molecule of the invention includes a nucleotide sequence that can interact with nucleotide sequence of a BACE gene and thereby mediate silencing of BACE gene expression, for example, wherein the siNA mediates regulation of BACE gene expression by cellular processes that modulate the chromatin structure or methylation patterns of the BACE gene and prevent transcription of the BACE gene.

[0021] In one embodiment, siNA molecules of the invention are used to down regulate or inhibit the expression of BACE proteins arising from BACE haplotype polymorphisms that are associated with a disease or condition, (e.g., Alzheimer's disease and other neurodegenerative disorders or conditions such as dementia and stroke/cardiovascular accident (CVA)). Analysis of BACE genes, or BACE protein or RNA levels can be used to identify subjects with such polymorphisms or those subjects who are at risk of developing traits, conditions, or diseases described herein. These subjects are amenable to treatment, for example, treatment with siNA molecules of the invention and any other composition useful in treating diseases related to BACE gene expression. As such, analysis of BACE protein or RNA levels can be used to determine treatment type and the course of therapy in treating a subject. Monitoring of BACE protein or RNA levels can be used to predict treatment outcome and to determine the efficacy of compounds and compositions that modulate the level and/or activity of certain BACE proteins associated with a trait, condition, or disease.

[0022] In one embodiment of the invention a siNA molecule comprises an antisense strand comprising a nucleotide sequence that is complementary to a nucleotide sequence or a portion thereof encoding a BACE protein. The siNA further comprises a sense strand, wherein said sense strand comprises a nucleotide sequence of a BACE gene or a portion thereof.

[0023] In another embodiment, a siNA molecule comprises an antisense region comprising a nucleotide sequence that is complementary to a nucleotide sequence encoding a BACE protein or a portion thereof. The siNA molecule further comprises a sense region, wherein said sense region comprises a nucleotide sequence of a BACE gene or a portion thereof.

[0024] In another embodiment, the invention features a siNA molecule comprising a nucleotide sequence in the antisense region of the siNA molecule that is complementary to a nucleotide sequence or portion of sequence of a BACE gene. In another embodiment, the invention features a siNA molecule comprising a region, for example, the antisense region of the siNA construct, complementary to a sequence comprising a BACE gene sequence or a portion thereof.

[0025] In one embodiment, the antisense region of BACE siNA constructs comprises a sequence complementary to sequence having any of SEQ ID NOs. 399-723, 1471-1478, 1591-1598, 1607-1614, 1623-1630, 1639-1646, 1655-1662, 1687, or 1689. In one embodiment, the antisense region of BACE constructs comprises sequence having any of SEQ ID NOs. 724-1048, 1599-1606, 1615-1622, 1631-1638, 1647-1654, 1663-1686, 1688, 1690, 1884, 1886, 1888, 1891, 1893, 1895, 1897, or 1900. In another embodiment, the sense region of BACE constructs comprises sequence having any of SEQ ID NOs. 399-723, 1471-1478, 1591-1598, 1607-1614, 1623-1630, 1639-1646, 1655-1662, 1687, 1689, 1883, 1885, 1887, 1889, 1890, 1892, 1894, 1896, 1898, or 1899.

[0026] In one embodiment, the antisense region of APP siNA constructs comprises a sequence complementary to sequence having any of SEQ ID NOs. 1-199, 1463-1470, 1495-1502, 1511-1518, 1527-1534, 1543-1550, or 1559-1566. In one embodiment, the antisense region of APP constructs comprises sequence having any of SEQ ID NOs. 200-398, 1503-1510, 1519-1526, 1535-1542, 1551-1558, 1567-1590, 1884, 1886, 1888, or 1891. In another embodiment, the sense region of APP constructs comprises sequence having any of SEQ ID NOs. 1-199, 1463-1470, 1495-1502, 1511-1518, 1527-1534, 1543-1550, 1559-1566, 1883, 1885, 1887, 1889, or 1890.

[0027] In one embodiment, the antisense region of PSEN1 siNA constructs comprises a sequence complementary to sequence having any of SEQ ID NOs. 1049-1131, 1479-1486, 1691-1698, 1707-1714, 1723-1730, 1739-1746, 1755-1762. In one embodiment, the antisense region of PSEN1 constructs comprises sequence having any of SEQ ID NOs. 1132-1214, 1699-1706, 1715-1722, 1731-1738, 1747-1754, 1763-1786, 1884, 1886, 1888, or 1891. In another embodiment, the sense region of PSEN1 constructs comprises sequence having any of SEQ ID NOs. 1049-1131, 1479-1486, 1691-1698, 1707-1714, 1723-1730, 1739-1746, 1755-1762, 1883, 1885, 1887, 1889, or 1890.

[0028] In one embodiment, the antisense region of PSEN2 siNA constructs comprises a sequence complementary to sequence having any of SEQ ID NOs. 1215-1338, 1487-1494, 1787-1794, 1803-1810, 1819-1826, 1835-1842, 1851-1858. In one embodiment, the antisense region of PSEN2 constructs comprises sequence having any of SEQ ID NOs. 1339-1462, 1795-1802, 1811-1818, 1827-1834, 1843-1850, 1859-1882, 1884, 1886, 1888, or 1891. In another embodiment, the sense region of PSEN2 constructs comprises sequence having any of SEQ ID NOs. SEQ ID NOs. 1215-1338, 1487-1494, 1787-1794, 1803-1810, 1819-1826, 1835-1842, 1851-1858, 1883, 1885, 1887, 1889, or 1890.

[0029] In one embodiment, a siNA molecule of the invention comprises any of SEQ ID NOs. 1-1900. The sequences shown in SEQ ID NOs: 1-1900 are not limiting. A siNA molecule of the invention can comprise any contiguous BACE sequence (e.g., about 18 to about 25, or about 18, 19, 20, 21, 22, 23, 24, or 25 contiguous BACE nucleotides).

[0030] In yet another embodiment, the invention features a siNA molecule comprising a sequence, for example, the antisense sequence of the siNA construct, complementary to a sequence or portion of sequence comprising sequence represented by GenBank Accession Nos. shown in Table I. Chemical modifications in Tables III and IV and described herein can be applied to any siNA construct of the invention.

[0031] In one embodiment of the invention a siNA molecule comprises an antisense strand having about 18 to about 29 (e.g., about 18, 19, 20, 21, 22, 23, 24, 25, 26, 27, 28, or 29) nucleotides, wherein the antisense strand is complementary to a RNA sequence encoding a BACE protein, and wherein said siNA further comprises a sense strand having about 18 to about 29 (e.g., about 18, 19, 20, 21, 22, 23, 24, 25, 26, 27, 28, or 29) nucleotides, and wherein said sense strand and said antisense strand are distinct nucleotide sequences with at least about 18 complementary nucleotides.

[0032] In another embodiment of the invention a siNA molecule of the invention comprises an antisense region having about 18 to about 29 (e.g., about 18, 19, 20, 21, 22, 23, 24, 25, 26, 27, 28, or 29) nucleotides, wherein the antisense region is complementary to a RNA sequence encoding a BACE protein, and wherein said siNA further comprises a sense region having about 18 to about 29 (e.g., about 18, 19, 20, 21, 22, 23, 24, 25, 26, 27, 28, or 29) nucleotides, wherein said sense region and said antisense region comprise a linear molecule with at least about 19 complementary nucleotides.

[0033] In one embodiment, a siNA molecule of the invention has RNAi activity that modulates expression of RNA encoded by a BACE gene. Because BACE genes can share some degree of sequence homology with each other, siNA molecules can be designed to target a class of BACE genes or alternately specific BACE genes (e.g., polymorphic variants) by selecting sequences that are either shared amongst different BACE targets or alternatively that are unique for a specific BACE target. Therefore, in one embodiment, the siNA molecule can be designed to target conserved regions of BACE RNA sequences having homology among several BACE gene variants so as to target a class of BACE genes with one siNA molecule. Accordingly, in one embodiment, the siNA molecule of the invention modulates the expression of one or both BACE alleles in a subject. In another embodiment, the siNA molecule can be designed to target a sequence that is unique to a specific BACE RNA sequence (e.g., a single BACE allele or BACE single nucleotide polymorphism (SNP)) due to the high degree of specificity that the siNA molecule requires to mediate RNAi activity.

[0034] In one embodiment, nucleic acid molecules of the invention that act as mediators of the RNA interference gene silencing response are double-stranded nucleic acid molecules. In another embodiment, the siNA molecules of the invention consist of duplex nucleic acid molecules containing about 18 base pairs between oligonucleotides comprising about 18 to about 25 (e.g., about 18, 19, 20, 21, 22, 23, 24, or 25) nucleotides. In yet another embodiment, siNA molecules of the invention comprise duplex nucleic acid molecules with overhanging ends of about about 1 to about 3 (e.g., about 1, 2, or 3) nucleotides, for example, about 21-nucleotide duplexes with about 18 base pairs and 3′-terminal mononucleotide, dinucleotide, or trinucleotide overhangs.

[0035] In one embodiment, the invention features one or more chemically-modified siNA constructs having specificity for BACE expressing nucleic acid molecules, such as RNA encoding a BACE protein. In one embodiment, the invention features a RNA based siNA molecule (e.g., a siNA comprising 2′-OH nucleotides) having specificity for BACE expressing nucleic acid molecules that includes one or more chemical modifications described herein. Non-limiting examples of such chemical modifications include without limitation phosphorothioate internucleotide linkages, 2′-deoxyribonucleotides, 2′-O-methyl ribonucleotides, 2′-deoxy-2′-fluoro ribonucleotides, “universal base” nucleotides, “acyclic” nucleotides, 5-C-methyl nucleotides, and terminal glyceryl and/or inverted deoxy abasic residue incorporation. These chemical modifications, when used in various siNA constructs, (e.g., RNA based siNA constructs), are shown to preserve RNAi activity in cells while at the same time, dramatically increasing the serum stability of these compounds. Furthermore, contrary to the data published by Parrish et al., supra, applicant demonstrates that multiple (greater than one) phosphorothioate substitutions are well-tolerated and confer substantial increases in serum stability for modified siNA constructs.

[0036] In one embodiment, a siNA molecule of the invention comprises modified nucleotides while maintaining the ability to mediate RNAi. The modified nucleotides can be used to improve in vitro or in vivo characteristics such as stability, activity, and/or bioavailability. For example, a siNA molecule of the invention can comprise modified nucleotides as a percentage of the total number of nucleotides present in the siNA molecule. As such, a siNA molecule of the invention can generally comprise about 5% to about 100% modified nucleotides (e.g., about 5%, 10%, 15%, 20%, 25%, 30%, 35%, 40%, 45%, 50%, 55%, 60%, 65%, 70%, 75%, 80%, 85%, 90%, 95% or 100% modified nucleotides). The actual percentage of modified nucleotides present in a given siNA molecule will depend on the total number of nucleotides present in the siNA. If the siNA molecule is single stranded, the percent modification can be based upon the total number of nucleotides present in the single stranded siNA molecules. Likewise, if the siNA molecule is double stranded, the percent modification can be based upon the total number of nucleotides present in the sense strand, antisense strand, or both the sense and antisense strands.

[0037] One aspect of the invention features a double-stranded short interfering nucleic acid (siNA) molecule that down-regulates expression of a BACE gene. In one embodiment, the double stranded siNA molecule comprises one or more chemical modifications and each strand of the double-stranded siNA is about 21 nucleotides long. In one embodiment, the double-stranded siNA molecule does not contain any ribonucleotides. In another embodiment, the double-stranded siNA molecule comprises one or more ribonucleotides. In one embodiment, each strand of the double-stranded siNA molecule comprises about 18 to about 29 (e.g., about 18, 19, 20, 21, 22, 23, 24, 25, 26, 27, 28, or 29) nucleotides, wherein each strand comprises about 18 nucleotides that are complementary to the nucleotides of the other strand. In one embodiment, one of the strands of the double-stranded siNA molecule comprises a nucleotide sequence that is complementary to a nucleotide sequence or a portion thereof of the BACE gene, and the second strand of the double-stranded siNA molecule comprises a nucleotide sequence substantially similar to the nucleotide sequence of the BACE gene or a portion thereof.

[0038] In another embodiment, the invention features a double-stranded short interfering nucleic acid (siNA) molecule that down-regulates expression of a BACE gene comprising an antisense region, wherein the antisense region comprises a nucleotide sequence that is complementary to a nucleotide sequence of the BACE gene or a portion thereof, and a sense region, wherein the sense region comprises a nucleotide sequence substantially similar to the nucleotide sequence of the BACE gene or a portion thereof. In one embodiment, the antisense region and the sense region each comprise about 18 to about 23 (e.g. about 18, 19, 20, 21, 22, or 23) nucleotides, wherein the antisense region comprises about 18 nucleotides that are complementary to nucleotides of the sense region.

[0039] In another embodiment, the invention features a double-stranded short interfering nucleic acid (siNA) molecule that down-regulates expression of a BACE gene comprising a sense region and an antisense region, wherein the antisense region comprises a nucleotide sequence that is complementary to a nucleotide sequence of RNA encoded by the BACE gene or a portion thereof and the sense region comprises a nucleotide sequence that is complementary to the antisense region.

[0040] In one embodiment, a siNA molecule of the invention comprises blunt ends, i.e., ends that do not include any overhanging nucleotides. For example, a siNA molecule comprising modifications described herein (e.g., comprising nucleotides having Formulae I-VII or siNA constructs comprising “Stab 00”-“Stab 25” (Table IV) or any combination thereof (see Table IV)) and/or any length described herein can comprise blunt ends or ends with no overhanging nucleotides.

[0041] In one embodiment, any siNA molecule of the invention can comprise one or more blunt ends, i.e. where a blunt end does not have any overhanging nucleotides. In one embodiment, the blunt ended siNA molecule has a number of base pairs equal to the number of nucleotides present in each strand of the siNA molecule. In another embodiment, the siNA molecule comprises one blunt end, for example wherein the 5′-end of the antisense strand and the 3′-end of the sense strand do not have any overhanging nucleotides. In another example, the siNA molecule comprises one blunt end, for example wherein the 3′-end of the antisense strand and the 5′-end of the sense strand do not have any overhanging nucleotides. In another example, a siNA molecule comprises two blunt ends, for example wherein the 3′-end of the antisense strand and the 5′-end of the sense strand as well as the 5′-end of the antisense strand and 3′-end of the sense strand do not have any overhanging nucleotides. A blunt ended siNA molecule can comprise, for example, from about 18 to about 30 nucleotides (e.g., about 18, 19, 20, 21, 22, 23, 24, 25, 26, 27, 28, 29, or 30 nucleotides). Other nucleotides present in a blunt ended siNA molecule can comprise, for example, mismatches, bulges, loops, or wobble base pairs to modulate the activity of the siNA molecule to mediate RNA interference.

[0042] By “blunt ends” is meant symmetric termini or termini of a double stranded siNA molecule having no overhanging nucleotides. The two strands of a double stranded siNA molecule align with each other without over-hanging nucleotides at the termini. For example, a blunt ended siNA construct comprises terminal nucleotides that are complementary between the sense and antisense regions of the siNA molecule.

[0043] In one embodiment, the invention features a double-stranded short interfering nucleic acid (siNA) molecule that down-regulates expression of a BACE gene, wherein the siNA molecule is assembled from two separate oligonucleotide fragments wherein one fragment comprises the sense region and the second fragment comprises the antisense region of the siNA molecule. The sense region can be connected to the antisense region via a linker molecule, such as a polynucleotide linker or a non-nucleotide linker.

[0044] In one embodiment, the invention features double-stranded short interfering nucleic acid (siNA) molecule that down-regulates expression of a BACE gene, wherein the siNA molecule comprises about 18 to about 21 base pairs, and wherein each strand of the siNA molecule comprises one or more chemical modifications. In another embodiment, one of the strands of the double-stranded siNA molecule comprises a nucleotide sequence that is complementary to a nucleotide sequence of a BACE gene or a portion thereof, and the second strand of the double-stranded siNA molecule comprises a nucleotide sequence substantially similar to the nucleotide sequence or a portion thereof of the BACE gene. In another embodiment, one of the strands of the double-stranded siNA molecule comprises a nucleotide sequence that is complementary to a nucleotide sequence of a BACE gene or portion thereof, and the second strand of the double-stranded siNA molecule comprises a nucleotide sequence substantially similar to the nucleotide sequence or portion thereof of the BACE gene. In another embodiment, each strand of the siNA molecule comprises about 18 to about 23 nucleotides, and each strand comprises at least about 18 nucleotides that are complementary to the nucleotides of the other strand. The BACE gene can comprise, for example, sequences referred to in Table I.

[0045] In one embodiment, a siNA molecule of the invention comprises no ribonucleotides. In another embodiment, a siNA molecule of the invention comprises ribonucleotides.

[0046] In one embodiment, a siNA molecule of the invention comprises an antisense region comprising a nucleotide sequence that is complementary to a nucleotide sequence of a BACE gene or a portion thereof, and the siNA further comprises a sense region comprising a nucleotide sequence substantially similar to the nucleotide sequence of the BACE gene or a portion thereof. In another embodiment, the antisense region and the sense region each comprise about 18 to about 23 nucleotides and the antisense region comprises at least about 18 nucleotides that are complementary to nucleotides of the sense region. The BACE gene can comprise, for example, sequences referred to in Table I.

[0047] In one embodiment, a siNA molecule of the invention comprises a sense region and an antisense region, wherein the antisense region comprises a nucleotide sequence that is complementary to a nucleotide sequence of RNA encoded by a BACE gene, or a portion thereof, and the sense region comprises a nucleotide sequence that is complementary to the antisense region. In one embodiment, the siNA molecule is assembled from two separate oligonucleotide fragments, wherein one fragment comprises the sense region and the second fragment comprises the antisense region of the siNA molecule. In another embodiment, the sense region is connected to the antisense region via a linker molecule. In another embodiment, the sense region is connected to the antisense region via a linker molecule, such as a nucleotide or non-nucleotide linker. The BACE gene can comprise, for example, sequences referred in to Table I.

[0048] In one embodiment, the invention features a double-stranded short interfering nucleic acid (siNA) molecule that down-regulates expression of a BACE gene comprising a sense region and an antisense region, wherein the antisense region comprises a nucleotide sequence that is complementary to a nucleotide sequence of RNA encoded by the BACE gene or a portion thereof and the sense region comprises a nucleotide sequence that is complementary to the antisense region, and wherein the siNA molecule has one or more modified pyrimidine and/or purine nucleotides. In one embodiment, the pyrimidine nucleotides in the sense region are 2′-O-methyl pyrimidine nucleotides or 2′-deoxy-2′-fluoro pyrimidine nucleotides and the purine nucleotides present in the sense region are 2′-deoxy purine nucleotides. In another embodiment, the pyrimidine nucleotides in the sense region are 2′-deoxy-2′-fluoro pyrimidine nucleotides and the purine nucleotides present in the sense region are 2′-O-methyl purine nucleotides. In another embodiment, the pyrimidine nucleotides in the sense region are 2′-deoxy-2′-fluoro pyrimidine nucleotides and the purine nucleotides present in the sense region are 2′-deoxy purine nucleotides. In one embodiment, the pyrimidine nucleotides in the antisense region are 2′-deoxy-2′-fluoro pyrimidine nucleotides and the purine nucleotides present in the antisense region are 2′-O-methyl or 2′-deoxy purine nucleotides. In another embodiment of any of the above-described siNA molecules, any nucleotides present in a non-complementary region of the sense strand (e.g. overhang region) are 2′-deoxy nucleotides.

[0049] In one embodiment, the invention features a double-stranded short interfering nucleic acid (siNA) molecule that down-regulates expression of a BACE gene, wherein the siNA molecule is assembled from two separate oligonucleotide fragments wherein one fragment comprises the sense region and the second fragment comprises the antisense region of the siNA molecule, and wherein the fragment comprising the sense region includes a terminal cap moiety at the 5′-end, the 3′-end, or both of the 5′ and 3′ ends of the fragment. In one embodiment, the terminal cap moiety is an inverted deoxy abasic moiety or glyceryl moiety. In one embodiment, each of the two fragments of the siNA molecule comprise about 21 nucleotides.

[0050] In one embodiment, the invention features a siNA molecule comprising at least one modified nucleotide, wherein the modified nucleotide is a 2′-deoxy-2′-fluoro nucleotide. The siNA can be, for example, of length between about 12 and about 36 nucleotides. In one embodiment, all pyrimidine nucleotides present in the siNA are 2′-deoxy-2′-fluoro pyrimidine nucleotides. In one embodiment, the modified nucleotides in the siNA include at least one 2′-deoxy-2′-fluoro cytidine or 2′-deoxy-2′-fluoro uridine nucleotide. In another embodiment, the modified nucleotides in the siNA include at least one 2′-fluoro cytidine and at least one 2′-deoxy-2′-fluoro uridine nucleotides. In one embodiment, all uridine nucleotides present in the siNA are 2′-deoxy-2′-fluoro uridine nucleotides. In one embodiment, all cytidine nucleotides present in the siNA are 2′-deoxy-2′-fluoro cytidine nucleotides. In one embodiment, all adenosine nucleotides present in the siNA are 2′-deoxy-2′-fluoro adenosine nucleotides. In one embodiment, all guanosine nucleotides present in the siNA are 2′-deoxy-2′-fluoro guanosine nucleotides. The siNA can further comprise at least one modified internucleotidic linkage, such as phosphorothioate linkage. In one embodiment, the 2′-deoxy-2′-fluoronucleotides are present at specifically selected locations in the siNA that are sensitive to cleavage by ribonucleases, such as locations having pyrimidine nucleotides.

[0051] In one embodiment, the invention features a method of increasing the stability of a siNA molecule against cleavage by ribonucleases comprising introducing at least one modified nucleotide into the siNA molecule, wherein the modified nucleotide is a 2′-deoxy-2′-fluoro nucleotide. In one embodiment, all pyrimidine nucleotides present in the siNA are 2′-deoxy-2′-fluoro pyrimidine nucleotides. In one embodiment, the modified nucleotides in the siNA include at least one 2′-deoxy-2′-fluoro cytidine or 2′-deoxy-2′-fluoro uridine nucleotide. In another embodiment, the modified nucleotides in the siNA include at least one 2′-fluoro cytidine and at least one 2′-deoxy-2′-fluoro uridine nucleotides. In one embodiment, all uridine nucleotides present in the siNA are 2′-deoxy-2′-fluoro uridine nucleotides. In one embodiment, all cytidine nucleotides present in the siNA are 2′-deoxy-2′-fluoro cytidine nucleotides. In one embodiment, all adenosine nucleotides present in the siNA are 2′-deoxy-2′-fluoro adenosine nucleotides. In one embodiment, all guanosine nucleotides present in the siNA are 2′-deoxy-2′-fluoro guanosine nucleotides. The siNA can further comprise at least one modified internucleotidic linkage, such as phosphorothioate linkage. In one embodiment, the 2′-deoxy-2′-fluoronucleotides are present at specifically selected locations in the siNA that are sensitive to cleavage by ribonucleases, such as locations having pyrimidine nucleotides.

[0052] In one embodiment, the invention features a double-stranded short interfering nucleic acid (siNA) molecule that down-regulates expression of a BACE gene comprising a sense region and an antisense region, wherein the antisense region comprises a nucleotide sequence that is complementary to a nucleotide sequence of RNA encoded by the BACE gene or a portion thereof and the sense region comprises a nucleotide sequence that is complementary to the antisense region, and wherein the purine nucleotides present in the antisense region comprise 2′-deoxy-purine nucleotides. In an alternative embodiment, the purine nucleotides present in the antisense region comprise 2′-O-methyl purine nucleotides. In either of the above embodiments, the antisense region can comprise a phosphorothioate internucleotide linkage at the 3′ end of the antisense region. Alternatively, in either of the above embodiments, the antisense region can comprise a glyceryl modification at the 3′ end of the antisense region. In another embodiment of any of the above-described siNA molecules, any nucleotides present in a non-complementary region of the antisense strand (e.g. overhang region) are 2′-deoxy nucleotides.

[0053] In one embodiment, the antisense region of a siNA molecule of the invention comprises sequence complementary to a portion of a BACE transcript having sequence unique to a particular BACE disease related allele, such as sequence comprising a single nucleotide polymorphism (SNP) associated with the disease specific allele. As such, the antisense region of a siNA molecule of the invention can comprise sequence complementary to sequences that are unique to a particular allele to provide specificity in mediating selective RNAi against the disease, condition, or trait related allele.

[0054] In one embodiment, the invention features a double-stranded short interfering nucleic acid (siNA) molecule that down-regulates expression of a BACE gene, wherein the siNA molecule is assembled from two separate oligonucleotide fragments wherein one fragment comprises the sense region and the second fragment comprises the antisense region of the siNA molecule. In another embodiment about 19 nucleotides of each fragment of the siNA molecule are base-paired to the complementary nucleotides of the other fragment of the siNA molecule and wherein at least two 3′ terminal nucleotides of each fragment of the siNA molecule are not base-paired to the nucleotides of the other fragment of the siNA molecule. In one embodiment, each of the two 3′ terminal nucleotides of each fragment of the siNA molecule is a 2′-deoxy-pyrimidine nucleotide, such as a 2′-deoxy-thymidine. In another embodiment, all 21 nucleotides of each fragment of the siNA molecule are base-paired to the complementary nucleotides of the other fragment of the siNA molecule. In another embodiment, about 19 nucleotides of the antisense region are base-paired to the nucleotide sequence or a portion thereof of the RNA encoded by the BACE gene. In another embodiment, about 21 nucleotides of the antisense region are base-paired to the nucleotide sequence or a portion thereof of the RNA encoded by the BACE gene. In any of the above embodiments, the 5′-end of the fragment comprising said antisense region can optionally includes a phosphate group.

[0055] In one embodiment, the invention features a double-stranded short interfering nucleic acid (siNA) molecule that inhibits the expression of a BACE RNA sequence (e.g., wherein said target RNA sequence is encoded by a BACE gene involved in the BACE pathway), wherein the siNA molecule does not contain any ribonucleotides and wherein each strand of the double-stranded siNA molecule is about 21 nucleotides long. Examples of non-ribonucleotide containing siNA constructs are combinations of stabilization chemistries shown in Table IV in any combination of Sense/Antisense chemistries, such as Stab 7/8, Stab 7/11, Stab 8/8, Stab 18/8, Stab 18/11, Stab 12/13, Stab 7/13, Stab 18/13, Stab 7/19, Stab 8/19, Stab 18/19, Stab 7/20, Stab 8/20, or Stab 18/20.

[0056] In one embodiment, the invention features a chemically synthesized double stranded RNA molecule that directs cleavage of a BACE RNA via RNA interference, wherein each strand of said RNA molecule is about 21 to about 23 nucleotides in length; one strand of the RNA molecule comprises nucleotide sequence having sufficient complementarity to the BACE RNA for the RNA molecule to direct cleavage of the BACE RNA via RNA interference; and wherein at least one strand of the RNA molecule comprises one or more chemically modified nucleotides described herein, such as deoxynucleotides, 2′-O-methyl nucleotides, 2′-deoxy-2′-fluoro nucloetides, 2′-O-methoxyethyl nucleotides etc.

[0057] In one embodiment, the invention features a medicament comprising a siNA molecule of the invention.

[0058] In one embodiment, the invention features an active ingredient comprising a siNA molecule of the invention.

[0059] In one embodiment, the invention features the use of a double-stranded short interfering nucleic acid (siNA) molecule to down-regulate expression of a BACE gene, wherein the siNA molecule comprises one or more chemical modifications and each strand of the double-stranded siNA is about 18 to about 28 or more (e.g., about 18, 19, 20, 21, 22, 23, 24, 25, 26, 27, or 28 or more) nucleotides long.

[0060] In one embodiment, the invention features the use of a double-stranded short interfering nucleic acid (siNA) molecule that inhibits expression of a BACE gene, wherein one of the strands of the double-stranded siNA molecule is an antisense strand which comprises nucleotide sequence that is complementary to nucleotide sequence of BACE RNA or a portion thereof, the other strand is a sense strand which comprises nucleotide sequence that is complementary to a nucleotide sequence of the antisense strand and wherein a majority of the pyrimidine nucleotides present in the double-stranded siNA molecule comprises a sugar modification.

[0061] In one embodiment, the invention features a double-stranded short interfering nucleic acid (siNA) molecule that inhibits expression of a BACE gene, wherein one of the strands of the double-stranded siNA molecule is an antisense strand which comprises nucleotide sequence that is complementary to nucleotide sequence of BACE RNA or a portion thereof, wherein the other strand is a sense strand which comprises nucleotide sequence that is complementary to a nucleotide sequence of the antisense strand and wherein a majority of the pyrimidine nucleotides present in the double-stranded siNA molecule comprises a sugar modification.

[0062] In one embodiment, the invention features a double-stranded short interfering nucleic acid (siNA) molecule that inhibits expression of a BACE gene, wherein one of the strands of the double-stranded siNA molecule is an antisense strand which comprises nucleotide sequence that is complementary to nucleotide sequence of BACE RNA that encodes a protein or portion thereof, the other strand is a sense strand which comprises nucleotide sequence that is complementary to a nucleotide sequence of the antisense strand and wherein a majority of the pyrimidine nucleotides present in the double-stranded siNA molecule comprises a sugar modification. In one embodiment, each strand of the siNA molecule comprises about 18 to about 29 or more (e.g., about 18, 19, 20, 21, 22, 23, 24, 25, 26, 27, 28, or 29 or more) nucleotides, wherein each strand comprises at least about 18 nucleotides that are complementary to the nucleotides of the other strand. In one embodiment, the siNA molecule is assembled from two oligonucleotide fragments, wherein one fragment comprises the nucleotide sequence of the antisense strand of the siNA molecule and a second fragment comprises nucleotide sequence of the sense region of the siNA molecule. In one embodiment, the sense strand is connected to the antisense strand via a linker molecule, such as a polynucleotide linker or a non-nucleotide linker. In a further embodiment, the pyrimidine nucleotides present in the sense strand are 2′-deoxy-2′fluoro pyrimidine nucleotides and the purine nucleotides present in the sense region are 2′-deoxy purine nucleotides. In another embodiment, the pyrimidine nucleotides present in the sense strand are 2′-deoxy-2′fluoro pyrimidine nucleotides and the purine nucleotides present in the sense region are 2′-O-methyl purine nucleotides. In still another embodiment, the pyrimidine nucleotides present in the antisense strand are 2′-deoxy-2′-fluoro pyrimidine nucleotides and any purine nucleotides present in the antisense strand are 2′-deoxy purine nucleotides. In another embodiment, the antisense strand comprises one or more 2′-deoxy-2′-fluoro pyrimidine nucleotides and one or more 2′-O-methyl purine nucleotides. In another embodiment, the pyrimidine nucleotides present in the antisense strand are 2′-deoxy-2′-fluoro pyrimidine nucleotides and any purine nucleotides present in the antisense strand are 2′-O-methyl purine nucleotides. In a further embodiment the sense strand comprises a 3′-end and a 5′-end, wherein a terminal cap moiety (e.g., an inverted deoxy abasic moiety or inverted deoxy nucleotide moiety such as inverted thymidine) is present at the 5′-end, the 3′-end, or both of the 5′ and 3′ ends of the sense strand. In another embodiment, the antisense strand comprises a phosphorothioate internucleotide linkage at the 3′ end of the antisense strand. In another embodiment, the antisense strand comprises a glyceryl modification at the 3′ end. In another embodiment, the 5′-end of the antisense strand optionally includes a phosphate group.

[0063] In any of the above-described embodiments of a double-stranded short interfering nucleic acid (siNA) molecule that inhibits expression of a BACE gene, wherein a majority of the pyrimidine nucleotides present in the double-stranded siNA molecule comprises a sugar modification, each of the two strands of the siNA molecule can comprise about 21 nucleotides. In one embodiment, about 21 nucleotides of each strand of the siNA molecule are base-paired to the complementary nucleotides of the other strand of the siNA molecule. In another embodiment, about 19 nucleotides of each strand of the siNA molecule are base-paired to the complementary nucleotides of the other strand of the siNA molecule, wherein at least two 3′ terminal nucleotides of each strand of the siNA molecule are not base-paired to the nucleotides of the other strand of the siNA molecule. In another embodiment, each of the two 3′ terminal nucleotides of each fragment of the siNA molecule is a 2′-deoxy-pyrimidine, such as 2′-deoxy-thymidine. In one embodiment, each strand of the siNA molecule is base-paired to the complementary nucleotides of the other strand of the siNA molecule. In one embodiment, about 19 nucleotides of the antisense strand are base-paired to the nucleotide sequence of the BACE RNA or a portion thereof. In one embodiment, about 21 nucleotides of the antisense strand are base-paired to the nucleotide sequence of the BACE RNA or a portion thereof.

[0064] In one embodiment, the invention features a double-stranded short interfering nucleic acid (siNA) molecule that inhibits expression of a BACE gene, wherein one of the strands of the double-stranded siNA molecule is an antisense strand which comprises nucleotide sequence that is complementary to nucleotide sequence of BACE RNA or a portion thereof, the other strand is a sense strand which comprises nucleotide sequence that is complementary to a nucleotide sequence of the antisense strand and wherein a majority of the pyrimidine nucleotides present in the double-stranded siNA molecule comprises a sugar modification, and wherein the 5′-end of the antisense strand optionally includes a phosphate group.

[0065] In one embodiment, the invention features a double-stranded short interfering nucleic acid (siNA) molecule that inhibits expression of a BACE gene, wherein one of the strands of the double-stranded siNA molecule is an antisense strand which comprises nucleotide sequence that is complementary to nucleotide sequence of BACE RNA or a portion thereof, the other strand is a sense strand which comprises nucleotide sequence that is complementary to a nucleotide sequence of the antisense strand and wherein a majority of the pyrimidine nucleotides present in the double-stranded siNA molecule comprises a sugar modification, and wherein the nucleotide sequence or a portion thereof of the antisense strand is complementary to a nucleotide sequence of the untranslated region or a portion thereof of the BACE RNA.

[0066] In one embodiment, the invention features a double-stranded short interfering nucleic acid (siNA) molecule that inhibits expression of a BACE gene, wherein one of the strands of the double-stranded siNA molecule is an antisense strand which comprises nucleotide sequence that is complementary to nucleotide sequence of BACE RNA or a portion thereof, wherein the other strand is a sense strand which comprises nucleotide sequence that is complementary to a nucleotide sequence of the antisense strand, wherein a majority of the pyrimidine nucleotides present in the double-stranded siNA molecule comprises a sugar modification, and wherein the nucleotide sequence of the antisense strand is complementary to a nucleotide sequence of the BACE RNA or a portion thereof that is present in the BACE RNA.

[0067] In one embodiment, the invention features a composition comprising a siNA molecule of the invention in a pharmaceutically acceptable carrier or diluent.

[0068] In a non-limiting example, the introduction of chemically-modified nucleotides into nucleic acid molecules provides a powerful tool in overcoming potential limitations of in vivo stability and bioavailability inherent to native RNA molecules that are delivered exogenously. For example, the use of chemically-modified nucleic acid molecules can enable a lower dose of a particular nucleic acid molecule for a given therapeutic effect since chemically-modified nucleic acid molecules tend to have a longer half-life in serum. Furthermore, certain chemical modifications can improve the bioavailability of nucleic acid molecules by targeting particular cells or tissues and/or improving cellular uptake of the nucleic acid molecule. Therefore, even if the activity of a chemically-modified nucleic acid molecule is reduced as compared to a native nucleic acid molecule, for example, when compared to an all-RNA nucleic acid molecule, the overall activity of the modified nucleic acid molecule can be greater than that of the native molecule due to improved stability and/or delivery of the molecule. Unlike native unmodified siNA, chemically-modified siNA can also minimize the possibility of activating interferon activity in humans.

[0069] In any of the embodiments of siNA molecules described herein, the antisense region of a siNA molecule of the invention can comprise a phosphorothioate internucleotide linkage at the 3′-end of said antisense region. In any of the embodiments of siNA molecules described herein, the antisense region can comprise about one to about five phosphorothioate internucleotide linkages at the 5′-end of said antisense region. In any of the embodiments of siNA molecules described herein, the 3′-terminal nucleotide overhangs of a siNA molecule of the invention can comprise ribonucleotides or deoxyribonucleotides that are chemically-modified at a nucleic acid sugar, base, or backbone. In any of the embodiments of siNA molecules described herein, the 3′-terminal nucleotide overhangs can comprise one or more universal base ribonucleotides. In any of the embodiments of siNA molecules described herein, the 3′-terminal nucleotide overhangs can comprise one or more acyclic nucleotides.

[0070] One embodiment of the invention provides an expression vector comprising a nucleic acid sequence encoding at least one siNA molecule of the invention in a manner that allows expression of the nucleic acid molecule. Another embodiment of the invention provides a mammalian cell comprising such an expression vector. The mammalian cell can be a human cell. The siNA molecule of the expression vector can comprise a sense region and an antisense region. The antisense region can comprise sequence complementary to a RNA or DNA sequence encoding BACE and the sense region can comprise sequence complementary to the antisense region. The siNA molecule can comprise two distinct strands having complementary sense and antisense regions. The siNA molecule can comprise a single strand having complementary sense and antisense regions.

[0071] In one embodiment, the invention features a chemically-modified short interfering nucleic acid (siNA) molecule capable of mediating RNA interference (RNAi) against BACE inside a cell or reconstituted in vitro system, wherein the chemical modification comprises one or more (e.g., about 1, 2, 3, 4, 5, 6, 7, 8, 9, 10, or more) nucleotides comprising a backbone modified internucleotide linkage having Formula I: [chemical structure]
[0072] wherein each R1 and R2 is independently any nucleotide, non-nucleotide, or polynucleotide which can be naturally-occurring or chemically-modified, each X and Y is independently O, S, N, alkyl, or substituted alkyl, each Z and W is independently O, S, N, alkyl, substituted alkyl, O-alkyl, S-alkyl, alkaryl, aralkyl, or acetyl and wherein W, X, Y, and Z are optionally not all O. In another embodiment, a backbone modification of the invention comprises a phosphonoacetate and/or thiophosphonoacetate internucleotide linkage (see for example Sheehan et al., 2003, Nucleic Acids Research, 31, 4109-4118).

[0073] The chemically-modified internucleotide linkages having Formula I, for example, wherein any Z, W, X, and/or Y independently comprises a sulphur atom, can be present in one or both oligonucleotide strands of the siNA duplex, for example, in the sense strand, the antisense strand, or both strands. The siNA molecules of the invention can comprise one or more (e.g., about 1, 2, 3, 4, 5, 6, 7, 8, 9, 10, or more) chemically-modified internucleotide linkages having Formula I at the 3′-end, the 5′-end, or both of the 3′ and 5′-ends of the sense strand, the antisense strand, or both strands. For example, an exemplary siNA molecule of the invention can comprise about 1 to about 5 or more (e.g., about 1, 2, 3, 4, 5, or more) chemically-modified internucleotide linkages having Formula I at the 5′-end of the sense strand, the antisense strand, or both strands. In another non-limiting example, an exemplary siNA molecule of the invention can comprise one or more (e.g., about 1, 2, 3, 4, 5, 6, 7, 8, 9, 10, or more) pyrimidine nucleotides with chemically-modified internucleotide linkages having Formula I in the sense strand, the antisense strand, or both strands. In yet another non-limiting example, an exemplary siNA molecule of the invention can comprise one or more (e.g., about 1, 2, 3, 4, 5, 6, 7, 8, 9, 10, or more) purine nucleotides with chemically-modified internucleotide linkages having Formula I in the sense strand, the antisense strand, or both strands. In another embodiment, a siNA molecule of the invention having internucleotide linkage(s) of Formula I also comprises a chemically-modified nucleotide or non-nucleotide having any of Formulae I-VII.

[0074] In one embodiment, the invention features a chemically-modified short interfering nucleic acid (siNA) molecule capable of mediating RNA interference (RNAi) against BACE inside a cell or reconstituted in vitro system, wherein the chemical modification comprises one or more (e.g., about 1, 2, 3, 4, 5, 6, 7, 8, 9, 10, or more) nucleotides or non-nucleotides having Formula II: [chemical structure]
wherein each R3, R4, R5, R6, R7, R8, R10, R11 and R12 is independently H, OH, alkyl, substituted alkyl, alkaryl or aralkyl, F, Cl, Br, CN, CF3, OCF3, OCN, O-alkyl, S-alkyl, N-alkyl, O-alkenyl, S-alkenyl, N-alkenyl, SO-alkyl, alkyl-OSH, alkyl-OH, O-alkyl-OH, O-alkyl-SH, S-alkyl-OH, S-alkyl-SH, alkyl-S-alkyl, alkyl-O-alkyl, ONO₂, NO₂, N3, NH2, aminoalkyl, aminoacid, aminoacyl, ONH2, O-aminoalkyl, O-aminoacid, O-aminoacyl, heterocycloalkyl, heterocycloalkaryl, aminoalkylamino, polyalklylamino, substituted silyl, or group having Formula I or II; R9 is O, S, CH2, S═O, CHF, or CF2, and B is a nucleosidic base such as adenine, guanine, uracil, cytosine, thymine, 2-aminoadenosine, 5-methylcytosine, 2,6-diaminopurine, or any other non-naturally occurring base that can be complementary or non-complementary to target RNA or a non-nucleosidic base such as phenyl, naphthyl, 3-nitropyrrole, 5-nitroindole, nebularine, pyridone, pyridinone, or any other non-naturally occurring universal base that can be complementary or non-complementary to target RNA.

[0075] The chemically-modified nucleotide or non-nucleotide of Formula II can be present in one or both oligonucleotide strands of the siNA duplex, for example in the sense strand, the antisense strand, or both strands. The siNA molecules of the invention can comprise one or more chemically-modified nucleotide or non-nucleotide of Formula II at the 3′-end, the 5′-end, or both of the 3′ and 5′-ends of the sense strand, the antisense strand, or both strands. For example, an exemplary siNA molecule of the invention can comprise about 1 to about 5 or more (e.g., about 1, 2, 3, 4, 5, or more) chemically-modified nucleotides or non-nucleotides of Formula II at the 5′-end of the sense strand, the antisense strand, or both strands. In anther non-limiting example, an exemplary siNA molecule of the invention can comprise about 1 to about 5 or more (e.g., about 1, 2, 3, 4, 5, or more) chemically-modified nucleotides or non-nucleotides of Formula II at the 3′-end of the sense strand, the antisense strand, or both strands.

[0076] In one embodiment, the invention features a chemically-modified short interfering nucleic acid (siNA) molecule capable of mediating RNA interference (RNAi) against BACE inside a cell or reconstituted in vitro system, wherein the chemical modification comprises one or more (e.g., about 1, 2, 3, 4, 5, 6, 7, 8, 9, 10, or more) nucleotides or non-nucleotides having Formula III: [chemical structure]
wherein each R3, R4, R5, R6, R7, R8, R10, R11 and R12 is independently H, OH, alkyl, substituted alkyl, alkaryl or aralkyl, F, Cl, Br, CN, CF3, OCF3, OCN, O-alkyl, S-alkyl, N-alkyl, O-alkenyl, S-alkenyl, N-alkenyl, SO-alkyl, alkyl-OSH, alkyl-OH, O-alkyl-OH, O-alkyl-SH, S-alkyl-OH, S-alkyl-SH, alkyl-S-alkyl, alkyl-O-alkyl, ONO₂, NO₂, N3, NH2, aminoalkyl, aminoacid, aminoacyl, ONH2, O-aminoalkyl, O-aminoacid, O-aminoacyl, heterocycloalkyl, heterocycloalkaryl, aminoalkylamino, polyalklylamino, substituted silyl, or group having Formula I or II; R9 is O, S, CH2, S═O, CHF, or CF2, and B is a nucleosidic base such as adenine, guanine, uracil, cytosine, thymine, 2-aminoadenosine, 5-methylcytosine, 2,6-diaminopurine, or any other non-naturally occurring base that can be employed to be complementary or non-complementary to target RNA or a non-nucleosidic base such as phenyl, naphthyl, 3-nitropyrrole, 5-nitroindole, nebularine, pyridone, pyridinone, or any other non-naturally occurring universal base that can be complementary or non-complementary to target RNA.

[0077] The chemically-modified nucleotide or non-nucleotide of Formula III can be present in one or both oligonucleotide strands of the siNA duplex, for example, in the sense strand, the antisense strand, or both strands. The siNA molecules of the invention can comprise one or more chemically-modified nucleotide or non-nucleotide of Formula III at the 3′-end, the 5′-end, or both of the 3′ and 5′-ends of the sense strand, the antisense strand, or both strands. For example, an exemplary siNA molecule of the invention can comprise about 1 to about 5 or more (e.g., about 1, 2, 3, 4, 5, or more) chemically-modified nucleotide(s) or non-nucleotide(s) of Formula III at the 5′-end of the sense strand, the antisense strand, or both strands. In anther non-limiting example, an exemplary siNA molecule of the invention can comprise about 1 to about 5 or more (e.g., about 1, 2, 3, 4, 5, or more) chemically-modified nucleotide or non-nucleotide of Formula III at the 3′-end of the sense strand, the antisense strand, or both strands.

[0078] In another embodiment, a siNA molecule of the invention comprises a nucleotide having Formula II or III, wherein the nucleotide having Formula II or III is in an inverted configuration. For example, the nucleotide having Formula II or III is connected to the siNA construct in a 3′-3′, 3′-2′, 2′-3′, or 5′-5′ configuration, such as at the 3′-end, the 5′-end, or both of the 3′ and 5′-ends of one or both siNA strands.

[0079] In one embodiment, the invention features a chemically-modified short interfering nucleic acid (siNA) molecule capable of mediating RNA interference (RNAi) against BACE inside a cell or reconstituted in vitro system, wherein the chemical modification comprises a 5′-terminal phosphate group having Formula IV: [chemical structure]
wherein each X and Y is independently O, S, N, alkyl, substituted alkyl, or alkylhalo; wherein each Z and W is independently O, S, N, alkyl, substituted alkyl, O-alkyl, S-alkyl, alkaryl, aralkyl, alkylhalo, or acetyl; and wherein W, X, Y and Z are not all O.

[0080] In one embodiment, the invention features a siNA molecule having a 5′-terminal phosphate group having Formula IV on the target-complementary strand, for example, a strand complementary to a target RNA, wherein the siNA molecule comprises an all RNA siNA molecule. In another embodiment, the invention features a siNA molecule having a 5′-terminal phosphate group having Formula IV on the target-complementary strand wherein the siNA molecule also comprises about 1 to about 3 (e.g., about 1, 2, or 3) nucleotide 3′-terminal nucleotide overhangs having about 1 to about 4 (e.g., about 1, 2, 3, or 4) deoxyribonucleotides on the 3′-end of one or both strands. In another embodiment, a 5′-terminal phosphate group having Formula IV is present on the target-complementary strand of a siNA molecule of the invention, for example a siNA molecule having chemical modifications having any of Formulae I-VII.

[0081] In one embodiment, the invention features a chemically-modified short interfering nucleic acid (siNA) molecule capable of mediating RNA interference (RNAi) against BACE inside a cell or reconstituted in vitro system, wherein the chemical modification comprises one or more phosphorothioate internucleotide linkages. For example, in a non-limiting example, the invention features a chemically-modified short interfering nucleic acid (siNA) having about 1, 2, 3, 4, 5, 6, 7, 8 or more phosphorothioate internucleotide linkages in one siNA strand. In yet another embodiment, the invention features a chemically-modified short interfering nucleic acid (siNA) individually having about 1, 2, 3, 4, 5, 6, 7, 8 or more phosphorothioate internucleotide linkages in both siNA strands. The phosphorothioate internucleotide linkages can be present in one or both oligonucleotide strands of the siNA duplex, for example in the sense strand, the antisense strand, or both strands. The siNA molecules of the invention can comprise one or more phosphorothioate internucleotide linkages at the 3′-end, the 5′-end, or both of the 3′- and 5′-ends of the sense strand, the antisense strand, or both strands. For example, an exemplary siNA molecule of the invention can comprise about 1 to about 5 or more (e.g., about 1, 2, 3, 4, 5, or more) consecutive phosphorothioate internucleotide linkages at the 5′-end of the sense strand, the antisense strand, or both strands. In another non-limiting example, an exemplary siNA molecule of the invention can comprise one or more (e.g., about 1, 2, 3, 4, 5, 6, 7, 8, 9, 10, or more) pyrimidine phosphorothioate internucleotide linkages in the sense strand, the antisense strand, or both strands. In yet another non-limiting example, an exemplary siNA molecule of the invention can comprise one or more (e.g., about 1, 2, 3, 4, 5, 6, 7, 8, 9, 10, or more) purine phosphorothioate internucleotide linkages in the sense strand, the antisense strand, or both strands.

[0082] In one embodiment, the invention features a siNA molecule, wherein the sense strand comprises one or more, for example, about 1, 2, 3, 4, 5, 6, 7, 8, 9, 10, or more phosphorothioate internucleotide linkages, and/or one or more (e.g., about 1, 2, 3, 4, 5, 6, 7, 8, 9, 10 or more) 2′-deoxy, 2′-O-methyl, 2′-deoxy-2′-fluoro, and/or about one or more (e.g., about 1, 2, 3, 4, 5, 6, 7, 8, 9, 10 or more) universal base modified nucleotides, and optionally a terminal cap molecule at the 3′-end, the 5′-end, or both of the 3′- and 5′-ends of the sense strand; and wherein the antisense strand comprises about 1 to about 10 or more, specifically about 1, 2, 3, 4, 5, 6, 7, 8, 9, 10, or more phosphorothioate internucleotide linkages, and/or one or more (e.g., about 1, 2, 3, 4, 5, 6, 7, 8, 9, 10 or more) 2′-deoxy, 2′-O-methyl, 2′-deoxy-2′-fluoro, and/or one or more (e.g., about 1, 2, 3, 4, 5, 6, 7, 8, 9, 10 or more) universal base modified nucleotides, and optionally a terminal cap molecule at the 3′-end, the 5′-end, or both of the 3′- and 5′-ends of the antisense strand. In another embodiment, one or more, for example about 1, 2, 3, 4, 5, 6, 7, 8, 9, 10, or more, pyrimidine nucleotides of the sense and/or antisense siNA strand are chemically-modified with 2′-deoxy, 2′-O-methyl and/or 2′-deoxy-2′-fluoro nucleotides, with or without one or more, for example about 1, 2, 3, 4, 5, 6, 7, 8, 9, 10, or more, phosphorothioate internucleotide linkages and/or a terminal cap molecule at the 3′-end, the 5′-end, or both of the 3′- and 5′-ends, being present in the same or different strand.

[0083] In another embodiment, the invention features a siNA molecule, wherein the sense strand comprises about 1 to about 5, specifically about 1, 2, 3, 4, or 5 phosphorothioate internucleotide linkages, and/or one or more (e.g., about 1, 2, 3, 4, 5, or more) 2′-deoxy, 2′-O-methyl, 2′-deoxy-2′-fluoro, and/or one or more (e.g., about 1, 2, 3, 4, 5, or more) universal base modified nucleotides, and optionally a terminal cap molecule at the 3-end, the 5′-end, or both of the 3′- and 5′-ends of the sense strand; and wherein the antisense strand comprises about 1 to about 5 or more, specifically about 1, 2, 3, 4, 5, or more phosphorothioate internucleotide linkages, and/or one or more (e.g., about 1, 2, 3, 4, 5, 6, 7, 8, 9, 10 or more) 2′-deoxy, 2′-O-methyl, 2′-deoxy-2′-fluoro, and/or one or more (e.g., about 1, 2, 3, 4, 5, 6, 7, 8, 9, 10 or more) universal base modified nucleotides, and optionally a terminal cap molecule at the 3′-end, the 5′-end, or both of the 3′- and 5′-ends of the antisense strand. In another embodiment, one or more, for example about 1, 2, 3, 4, 5, 6, 7, 8, 9, 10, or more, pyrimidine nucleotides of the sense and/or antisense siNA strand are chemically-modified with 2′-deoxy, 2′-O-methyl and/or 2′-deoxy-2′-fluoro nucleotides, with or without about 1 to about 5 or more, for example about 1, 2, 3, 4, 5, or more phosphorothioate internucleotide linkages and/or a terminal cap molecule at the 3′-end, the 5′-end, or both of the 3′- and 5′-ends, being present in the same or different strand.

[0084] In one embodiment, the invention features a siNA molecule, wherein the antisense strand comprises one or more, for example, about 1, 2, 3, 4, 5, 6, 7, 8, 9, 10, or more phosphorothioate internucleotide linkages, and/or about one or more (e.g., about 1, 2, 3, 4, 5, 6, 7, 8, 9, 10 or more) 2′-deoxy, 2′-O-methyl, 2′-deoxy-2′-fluoro, and/or one or more (e.g., about 1, 2, 3, 4, 5, 6, 7, 8, 9, 10 or more) universal base modified nucleotides, and optionally a terminal cap molecule at the 3′-end, the 5′-end, or both of the 3′- and 5′-ends of the sense strand; and wherein the antisense strand comprises about 1 to about 10 or more, specifically about 1, 2, 3, 4, 5, 6, 7, 8, 9, 10 or more phosphorothioate internucleotide linkages, and/or one or more (e.g., about 1, 2, 3, 4, 5, 6, 7, 8, 9, 10 or more) 2′-deoxy, 2′-O-methyl, 2′-deoxy-2′-fluoro, and/or one or more (e.g., about 1, 2, 3, 4, 5, 6, 7, 8, 9, 10 or more) universal base modified nucleotides, and optionally a terminal cap molecule at the 3′-end, the 5′-end, or both of the 3′- and 5′-ends of the antisense strand. In another embodiment, one or more, for example about 1, 2, 3, 4, 5, 6, 7, 8, 9, 10 or more pyrimidine nucleotides of the sense and/or antisense siNA strand are chemically-modified with 2′-deoxy, 2′-O-methyl and/or 2′-deoxy-2′-fluoro nucleotides, with or without one or more, for example, about 1, 2, 3, 4, 5, 6, 7, 8, 9, 10 or more phosphorothioate internucleotide linkages and/or a terminal cap molecule at the 3′-end, the 5′-end, or both of the 3′ and 5′-ends, being present in the same or different strand.

[0085] In another embodiment, the invention features a siNA molecule, wherein the antisense strand comprises about 1 to about 5 or more, specifically about 1, 2, 3, 4, 5 or more phosphorothioate internucleotide linkages, and/or one or more (e.g., about 1, 2, 3, 4, 5, 6, 7, 8, 9, 10 or more) 2′-deoxy, 2′-O-methyl, 2′-deoxy-2′-fluoro, and/or one or more (e.g., about 1, 2, 3, 4, 5, 6, 7, 8, 9, 10 or more) universal base modified nucleotides, and optionally a terminal cap molecule at the 3′-end, the 5′-end, or both of the 3′- and 5′-ends of the sense strand; and wherein the antisense strand comprises about 1 to about 5 or more, specifically about 1, 2, 3, 4, 5 or more phosphorothioate internucleotide linkages, and/or one or more (e.g., about 1, 2, 3, 4, 5, 6, 7, 8, 9, 10 or more) 2′-deoxy, 2′-O-methyl, 2′-deoxy-2′-fluoro, and/or one or more (e.g., about 1, 2, 3, 4, 5, 6, 7, 8, 9, 10 or more) universal base modified nucleotides, and optionally a terminal cap molecule at the 3′-end, the 5′-end, or both of the 3′- and 5′-ends of the antisense strand. In another embodiment, one or more, for example about 1, 2, 3, 4, 5, 6, 7, 8, 9, 10 or more pyrimidine nucleotides of the sense and/or antisense siNA strand are chemically-modified with 2′-deoxy, 2′-O-methyl and/or 2′-deoxy-2′-fluoro nucleotides, with or without about 1 to about 5, for example about 1, 2, 3, 4, 5 or more phosphorothioate internucleotide linkages and/or a terminal cap molecule at the 3′-end, the 5′-end, or both of the 3′- and 5′-ends, being present in the same or different strand.

[0086] In one embodiment, the invention features a chemically-modified short interfering nucleic acid (siNA) molecule having about 1 to about 5 or more (specifically about 1, 2, 3, 4, 5 or more)phosphorothioate internucleotide linkages in each strand of the siNA molecule.

[0087] In another embodiment, the invention features a siNA molecule comprising 2′-5′ internucleotide linkages. The 2′-5′ internucleotide linkage(s) can be at the 3′-end, the 5′-end, or both of the 3′- and 5′-ends of one or both siNA sequence strands. In addition, the 2′-5′ internucleotide linkage(s) can be present at various other positions within one or both siNA sequence strands, for example, about 1, 2, 3, 4, 5, 6, 7, 8, 9, 10, or more including every internucleotide linkage of a pyrimidine nucleotide in one or both strands of the siNA molecule can comprise a 2′-5′ internucleotide linkage, or about 1, 2, 3, 4, 5, 6, 7, 8, 9, 10, or more including every internucleotide linkage of a purine nucleotide in one or both strands of the siNA molecule can comprise a 2′-5′ internucleotide linkage.

[0088] In another embodiment, a chemically-modified siNA molecule of the invention comprises a duplex having two strands, one or both of which can be chemically-modified, wherein each strand is about 18 to about 27 (e.g., about 18, 19, 20, 21, 22, 23, 24, 25, 26, or 27) nucleotides in length, wherein the duplex has about 18 to about 23 (e.g., about 18, 19, 20, 21, 22, or 23) base pairs, and wherein the chemical modification comprises a structure having any of Formulae I-VII. For example, an exemplary chemically-modified siNA molecule of the invention comprises a duplex having two strands, one or both of which can be chemically-modified with a chemical modification having any of Formulae I-VII or any combination thereof, wherein each strand consists of about 21 nucleotides, each having a 2-nucleotide 3′-terminal nucleotide overhang, and wherein the duplex has about 19 base pairs. In another embodiment, a siNA molecule of the invention comprises a single stranded hairpin structure, wherein the siNA is about 36 to about 70 (e.g., about 36, 40, 45, 50, 55, 60, 65, or 70) nucleotides in length having about 18 to about 23 (e.g., about 18, 19, 20, 21, 22, or 23) base pairs, and wherein the siNA can include a chemical modification comprising a structure having any of Formulae I-VII or any combination thereof. For example, an exemplary chemically-modified siNA molecule of the invention comprises a linear oligonucleotide having about 42 to about 50 (e.g., about 42, 43, 44, 45, 46, 47, 48, 49, or 50) nucleotides that is chemically-modified with a chemical modification having any of Formulae I-VII or any combination thereof, wherein the linear oligonucleotide forms a hairpin structure having about 19 base pairs and a 2-nucleotide 3′-terminal nucleotide overhang. In another embodiment, a linear hairpin siNA molecule of the invention contains a stem loop motif, wherein the loop portion of the siNA molecule is biodegradable. For example, a linear hairpin siNA molecule of the invention is designed such that degradation of the loop portion of the siNA molecule in vivo can generate a double-stranded siNA molecule with 3′-terminal overhangs, such as 3′-terminal nucleotide overhangs comprising about 2 nucleotides.

[0089] In another embodiment, a siNA molecule of the invention comprises a hairpin structure, wherein the siNA is about 25 to about 50 (e.g., about 25, 26, 27, 28, 29, 30, 31, 32, 33, 34, 35, 36, 37, 38, 39, 40, 41, 42, 43, 44, 45, 46, 47, 48, 49, or 50) nucleotides in length having about 3 to about 25 (e.g., about 3, 4, 5, 6, 7, 8, 9, 10, 11, 12, 13, 14, 15, 16, 17, 18, 19, 20, 21, 22, 23, 24, or 25) base pairs, and wherein the siNA can include one or more chemical modifications comprising a structure having any of Formulae I-VII or any combination thereof. For example, an exemplary chemically-modified siNA molecule of the invention comprises a linear oligonucleotide having about 25 to about 35 (e.g., about 25, 26, 27, 28, 29, 30, 31, 32, 33, 34, or 35) nucleotides that is chemically-modified with one or more chemical modifications having any of Formulae I-VII or any combination thereof, wherein the linear oligonucleotide forms a hairpin structure having about 3 to about 23 (e.g., about 3, 4, 5, 6, 7, 8, 9, 10, 11, 12, 13, 14, 15, 16, 17, 18, 19, 20, 21, 22, or 23) base pairs and a 5′-terminal phosphate group that can be chemically modified as described herein (for example a 5′-terminal phosphate group having Formula IV). In another embodiment, a linear hairpin siNA molecule of the invention contains a stem loop motif, wherein the loop portion of the siNA molecule is biodegradable. In one embodiment, a linear hairpin siNA molecule of the invention comprises a loop portion comprising a non-nucleotide linker.

[0090] In another embodiment, a siNA molecule of the invention comprises an asymmetric hairpin structure, wherein the siNA is about 25 to about 50 (e.g., about 25, 26, 27, 28, 29, 30, 31, 32, 33, 34, 35, 36, 37, 38, 39, 40, 41, 42, 43, 44, 45, 46, 47, 48, 49, or 50) nucleotides in length having about 3 to about 20 (e.g., about 3, 4, 5, 6, 7, 8, 9, 10, 11, 12, 13, 14, 15, 16, 17, 18, 19, or 20) base pairs, and wherein the siNA can include one or more chemical modifications comprising a structure having any of Formulae I-VII or any combination thereof. For example, an exemplary chemically-modified siNA molecule of the invention comprises a linear oligonucleotide having about 25 to about 35 (e.g., about 25, 26, 27, 28, 29, 30, 31, 32, 33, 34, or 35) nucleotides that is chemically-modified with one or more chemical modifications having any of Formulae I-VII or any combination thereof, wherein the linear oligonucleotide forms an asymmetric hairpin structure having about 3 to about 18 (e.g., about 3, 4, 5, 6, 7, 8, 9, 10, 11, 12, 13, 14, 15, 16, 17, or 18) base pairs and a 5′-terminal phosphate group that can be chemically modified as described herein (for example a 5′-terminal phosphate group having Formula IV). In one embodiment, an asymmetric hairpin siNA molecule of the invention contains a stem loop motif, wherein the loop portion of the siNA molecule is biodegradable. In another embodiment, an asymmetric hairpin siNA molecule of the invention comprises a loop portion comprising a non-nucleotide linker.

[0091] In another embodiment, a siNA molecule of the invention comprises an asymmetric double stranded structure having separate polynucleotide strands comprising sense and antisense regions, wherein the antisense region is about 16 to about 25 (e.g., about 16, 17, 18, 19, 20, 21, 22, 23, 24, or 25) nucleotides in length, wherein the sense region is about 3 to about 18 (e.g., about 3, 4, 5, 6, 7, 8, 9, 10, 11, 12, 13, 14, 15, 16, 17, or 18) nucleotides in length, wherein the sense region and the antisense region have at least 3 complementary nucleotides, and wherein the siNA can include one or more chemical modifications comprising a structure having any of Formulae I-VII or any combination thereof. For example, an exemplary chemically-modified siNA molecule of the invention comprises an asymmetric double stranded structure having separate polynucleotide strands comprising sense and antisense regions, wherein the antisense region is about 18 to about 22 (e.g., about 18, 19, 20, 21, or 22) nucleotides in length and wherein the sense region is about 3 to about 15 (e.g., about 3, 4, 5, 6, 7, 8, 9, 10, 11, 12, 13, 14, or 15) nucleotides in length, wherein the sense region the antisense region have at least 3 complementary nucleotides, and wherein the siNA can include one or more chemical modifications comprising a structure having any of Formulae I-VII or any combination thereof. In another embodiment, the asymmetic double stranded siNA molecule can also have a 5′-terminal phosphate group that can be chemically modified as described herein (for example a 5′-terminal phosphate group having Formula IV).

[0092] In another embodiment, a siNA molecule of the invention comprises a circular nucleic acid molecule, wherein the siNA is about 38 to about 70 (e.g., about 38, 40, 45, 50, 55, 60, 65, or 70) nucleotides in length having about 18 to about 23 (e.g., about 18, 19, 20, 21, 22, or 23) base pairs, and wherein the siNA can include a chemical modification, which comprises a structure having any of Formulae I-VII or any combination thereof. For example, an exemplary chemically-modified siNA molecule of the invention comprises a circular oligonucleotide having about 42 to about 50 (e.g., about 42, 43, 44, 45, 46, 47, 48, 49, or 50) nucleotides that is chemically-modified with a chemical modification having any of Formulae I-VII or any combination thereof, wherein the circular oligonucleotide forms a dumbbell shaped structure having about 19 base pairs and 2 loops.

[0093] In another embodiment, a circular siNA molecule of the invention contains two loop motifs, wherein one or both loop portions of the siNA molecule is biodegradable. For example, a circular siNA molecule of the invention is designed such that degradation of the loop portions of the siNA molecule in vivo can generate a double-stranded siNA molecule with 3′-terminal overhangs, such as 3′-terminal nucleotide overhangs comprising about 2 nucleotides.

[0094] In one embodiment, a siNA molecule of the invention comprises at least one (e.g., about 1, 2, 3, 4, 5, 6, 7, 8, 9, 10, or more) abasic moiety, for example a compound having Formula V: [chemical structure]
wherein each R3, R4, R5, R6, R7, R8, R10, R11, R12, and R13 is independently H, OH, alkyl, substituted alkyl, alkaryl or aralkyl, F, Cl, Br, CN, CF3, OCF3, OCN, O-alkyl, S-alkyl, N-alkyl, O-alkenyl, S-alkenyl, N-alkenyl, SO-alkyl, alkyl-OSH, alkyl-OH, O-alkyl-OH, O-alkyl-SH, S-alkyl-OH, S-alkyl-SH, alkyl-S-alkyl, alkyl-O-alkyl, ONO2, NO2, N3, NH2, aminoalkyl, aminoacid, aminoacyl, ONH2, O-aminoalkyl, O-aminoacid, O-aminoacyl, heterocycloalkyl, heterocycloalkaryl, aminoalkylamino, polyalklylamino, substituted silyl, or group having Formula I or II; R9 is O, S, CH2, S═O, CHF, or CF2.

[0095] In one embodiment, a siNA molecule of the invention comprises at least one (e.g., about 1, 2, 3, 4, 5, 6, 7, 8, 9, 10, or more) inverted abasic moiety, for example a compound having Formula VI: [chemical structure]
wherein each R3, R4, R5, R6, R7, R8, R10, R11, R12, and R13 is independently H, OH, alkyl, substituted alkyl, alkaryl or aralkyl, F, Cl, Br, CN, CF3, OCF3, OCN, O-alkyl, S-alkyl, N-alkyl, O-alkenyl, S-alkenyl, N-alkenyl, SO-alkyl, alkyl-OSH, alkyl-OH, O-alkyl-OH, O-alkyl-SH, S-alkyl-OH, S-alkyl-SH, alkyl-S-alkyl, alkyl-O-alkyl, ONO2, NO2, N3, NH2, aminoalkyl, aminoacid, aminoacyl, ONH2, O-aminoalkyl, O-aminoacid, O-aminoacyl, heterocycloalkyl, heterocycloalkaryl, aminoalkylamino, polyalklylamino, substituted silyl, or group having Formula I or II; R9 is O, S, CH2, S═O, CHF, or CF2, and either R2, R3, R8 or R13 serve as points of attachment to the siNA molecule of the invention.

[0096] In another embodiment, a siNA molecule of the invention comprises at least one (e.g., about 1, 2, 3, 4, 5, 6, 7, 8, 9, 10, or more) substituted polyalkyl moieties, for example a compound having Formula VII: [chemical structure]
wherein each n is independently an integer from 1 to 12, each R1, R2 and R3 is independently H, OH, alkyl, substituted alkyl, alkaryl or aralkyl, F, Cl, Br, CN, CF3, OCF3, OCN, O-alkyl, S-alkyl, N-alkyl, O-alkenyl, S-alkenyl, N-alkenyl, SO-alkyl, alkyl-OSH, alkyl-OH, O-alkyl-OH, O-alkyl-SH, S-alkyl-OH, S-alkyl-SH, alkyl-S-alkyl, alkyl-O-alkyl, ONO2, NO₂, N3, NH2, aminoalkyl, aminoacid, aminoacyl, ONH2, O-aminoalkyl, O-aminoacid, O-aminoacyl, heterocycloalkyl, heterocycloalkaryl, aminoalkylamino, polyalklylamino, substituted silyl, or a group having Formula I, and R1, R2 or R3 serves as points of attachment to the siNA molecule of the invention.

[0097] In another embodiment, the invention features a compound having Formula VII, wherein R1 and R2 are hydroxyl (OH) groups, n=1, and R3 comprises O and is the point of attachment to the 3′-end, the 5′-end, or both of the 3′ and 5′-ends of one or both strands of a double-stranded siNA molecule of the invention or to a single-stranded siNA molecule of the invention. This modification is referred to herein as “glyceryl” (for example modification 6 in FIG. 10).

[0098] In another embodiment, a chemically modified nucleoside or non-nucleoside (e.g. a moiety having any of Formula V, VI or VII) of the invention is at the 3′-end, the 5′-end, or both of the 3′ and 5′-ends of a siNA molecule of the invention. For example, chemically modified nucleoside or non-nucleoside (e.g., a moiety having Formula V, VI or VII) can be present at the 3′-end, the 5′-end, or both of the 3′ and 5′-ends of the antisense strand, the sense strand, or both antisense and sense strands of the siNA molecule. In one embodiment, the chemically modified nucleoside or non-nucleoside (e.g., a moiety having Formula V, VI or VII) is present at the 5′-end and 3′-end of the sense strand and the 3′-end of the antisense strand of a double stranded siNA molecule of the invention. In one embodiment, the chemically modified nucleoside or non-nucleoside (e.g., a moiety having Formula V, VI or VII) is present at the terminal position of the 5′-end and 3′-end of the sense strand and the 3′-end of the antisense strand of a double stranded siNA molecule of the invention. In one embodiment, the chemically modified nucleoside or non-nucleoside (e.g., a moiety having Formula V, VI or VII) is present at the two terminal positions of the 5′-end and 3′-end of the sense strand and the 3′-end of the antisense strand of a double stranded siNA molecule of the invention. In one embodiment, the chemically modified nucleoside or non-nucleoside (e.g., a moiety having Formula V, VI or VII) is present at the penultimate position of the 5′-end and 3′-end of the sense strand and the 3′-end of the antisense strand of a double stranded siNA molecule of the invention. In addition, a moiety having Formula VII can be present at the 3′-end or the 5′-end of a hairpin siNA molecule as described herein.

[0099] In another embodiment, a siNA molecule of the invention comprises an abasic residue having Formula V or VI, wherein the abasic residue having Formula VI or VI is connected to the siNA construct in a 3′-3′, 3′-2′, 2′-3′, or 5′-5′ configuration, such as at the 3′-end, the 5′-end, or both of the 3′ and 5′-ends of one or both siNA strands.

[0100] In one embodiment, a siNA molecule of the invention comprises one or more (e.g., about 1, 2, 3, 4, 5, 6, 7, 8, 9, 10, or more) locked nucleic acid (LNA) nucleotides, for example, at the 5′-end, the 3′-end, both of the 5′ and 3′-ends, or any combination thereof, of the siNA molecule.

[0101] In another embodiment, a siNA molecule of the invention comprises one or more (e.g., about 1, 2, 3, 4, 5, 6, 7, 8, 9, 10, or more) acyclic nucleotides, for example, at the 5′-end, the 3′-end, both of the 5′ and 3′-ends, or any combination thereof, of the siNA molecule.

[0102] In one embodiment, the invention features a chemically-modified short interfering nucleic acid (siNA) molecule of the invention comprising a sense region, wherein any (e.g., one or more or all) pyrimidine nucleotides present in the sense region are 2′-deoxy-2′-fluoro pyrimidine nucleotides (e.g., wherein all pyrimidine nucleotides are 2′-deoxy-2′-fluoro pyrimidine nucleotides or alternately a plurality of pyrimidine nucleotides are 2′-deoxy-2′-fluoro pyrimidine nucleotides), and wherein any (e.g., one or more or all) purine nucleotides present in the sense region are 2′-deoxy purine nucleotides (e.g., wherein all purine nucleotides are 2′-deoxy purine nucleotides or alternately a plurality of purine nucleotides are 2′-deoxy purine nucleotides).

[0103] In one embodiment, the invention features a chemically-modified short interfering nucleic acid (siNA) molecule of the invention comprising a sense region, wherein any (e.g., one or more or all) pyrimidine nucleotides present in the sense region are 2′-deoxy-2′-fluoro pyrimidine nucleotides (e.g., wherein all pyrimidine nucleotides are 2′-deoxy-2′-fluoro pyrimidine nucleotides or alternately a plurality of pyrimidine nucleotides are 2′-deoxy-2′-fluoro pyrimidine nucleotides), and wherein any (e.g., one or more or all) purine nucleotides present in the sense region are 2′-deoxy purine nucleotides (e.g., wherein all purine nucleotides are 2′-deoxy purine nucleotides or alternately a plurality of purine nucleotides are 2′-deoxy purine nucleotides), wherein any nucleotides comprising a 3′-terminal nucleotide overhang that are present in said sense region are 2′-deoxy nucleotides.

[0104] In one embodiment, the invention features a chemically-modified short interfering nucleic acid (siNA) molecule of the invention comprising a sense region, wherein any (e.g., one or more or all) pyrimidine nucleotides present in the sense region are 2′-deoxy-2′-fluoro pyrimidine nucleotides (e.g., wherein all pyrimidine nucleotides are 2′-deoxy-2′-fluoro pyrimidine nucleotides or alternately a plurality of pyrimidine nucleotides are 2′-deoxy-2′-fluoro pyrimidine nucleotides), and wherein any (e.g., one or more or all) purine nucleotides present in the sense region are 2′-O-methyl purine nucleotides (e.g., wherein all purine nucleotides are 2′-O-methyl purine nucleotides or alternately a plurality of purine nucleotides are 2′-O-methyl purine nucleotides).

[0105] In one embodiment, the invention features a chemically-modified short interfering nucleic acid (siNA) molecule of the invention comprising a sense region, wherein any (e.g., one or more or all) pyrimidine nucleotides present in the sense region are 2′-deoxy-2′-fluoro pyrimidine nucleotides (e.g., wherein all pyrimidine nucleotides are 2′-deoxy-2′-fluoro pyrimidine nucleotides or alternately a plurality of pyrimidine nucleotides are 2′-deoxy-2′-fluoro pyrimidine nucleotides), wherein any (e.g., one or more or all) purine nucleotides present in the sense region are 2′-O-methyl purine nucleotides (e.g., wherein all purine nucleotides are 2′-O-methyl purine nucleotides or alternately a plurality of purine nucleotides are 2′-O-methyl purine nucleotides), and wherein any nucleotides comprising a 3′-terminal nucleotide overhang that are present in said sense region are 2′-deoxy nucleotides.

[0106] In one embodiment, the invention features a chemically-modified short interfering nucleic acid (siNA) molecule of the invention comprising an antisense region, wherein any (e.g., one or more or all) pyrimidine nucleotides present in the antisense region are 2′-deoxy-2′-fluoro pyrimidine nucleotides (e.g., wherein all pyrimidine nucleotides are 2′-deoxy-2′-fluoro pyrimidine nucleotides or alternately a plurality of pyrimidine nucleotides are 2′-deoxy-2′-fluoro pyrimidine nucleotides), and wherein any (e.g., one or more or all) purine nucleotides present in the antisense region are 2′-O-methyl purine nucleotides (e.g., wherein all purine nucleotides are 2′-O-methyl purine nucleotides or alternately a plurality of purine nucleotides are 2′-O-methyl purine nucleotides).

[0107] In one embodiment, the invention features a chemically-modified short interfering nucleic acid (siNA) molecule of the invention comprising an antisense region, wherein any (e.g., one or more or all) pyrimidine nucleotides present in the antisense region are 2′-deoxy-2′-fluoro pyrimidine nucleotides (e.g., wherein all pyrimidine nucleotides are 2′-deoxy-2′-fluoro pyrimidine nucleotides or alternately a plurality of pyrimidine nucleotides are 2′-deoxy-2′-fluoro pyrimidine nucleotides), wherein any (e.g., one or more or all) purine nucleotides present in the antisense region are 2′-O-methyl purine nucleotides (e.g., wherein all purine nucleotides are 2′-O-methyl purine nucleotides or alternately a plurality of purine nucleotides are 2′-O-methyl purine nucleotides), and wherein any nucleotides comprising a 3′-terminal nucleotide overhang that are present in said antisense region are 2′-deoxy nucleotides.

[0108] In one embodiment, the invention features a chemically-modified short interfering nucleic acid (siNA) molecule of the invention comprising an antisense region, wherein any (e.g., one or more or all) pyrimidine nucleotides present in the antisense region are 2′-deoxy-2′-fluoro pyrimidine nucleotides (e.g., wherein all pyrimidine nucleotides are 2′-deoxy-2′-fluoro pyrimidine nucleotides or alternately a plurality of pyrimidine nucleotides are 2′-deoxy-2′-fluoro pyrimidine nucleotides), and wherein any (e.g., one or more or all) purine nucleotides present in the antisense region are 2′-deoxy purine nucleotides (e.g., wherein all purine nucleotides are 2′-deoxy purine nucleotides or alternately a plurality of purine nucleotides are 2′-deoxy purine nucleotides).

[0109] In one embodiment, the invention features a chemically-modified short interfering nucleic acid (siNA) molecule of the invention comprising an antisense region, wherein any (e.g., one or more or all) pyrimidine nucleotides present in the antisense region are 2′-deoxy-2′-fluoro pyrimidine nucleotides (e.g., wherein all pyrimidine nucleotides are 2′-deoxy-2′-fluoro pyrimidine nucleotides or alternately a plurality of pyrimidine nucleotides are 2′-deoxy-2′-fluoro pyrimidine nucleotides), and wherein any (e.g., one or more or all) purine nucleotides present in the antisense region are 2′-O-methyl purine nucleotides (e.g., wherein all purine nucleotides are 2′-O-methyl purine nucleotides or alternately a plurality of purine nucleotides are 2′-O-methyl purine nucleotides).

[0110] In one embodiment, the invention features a chemically-modified short interfering nucleic acid (siNA) molecule of the invention capable of mediating RNA interference (RNAi) against BACE inside a cell or reconstituted in vitro system comprising a sense region, wherein one or more pyrimidine nucleotides present in the sense region are 2′-deoxy-2′-fluoro pyrimidine nucleotides (e.g., wherein all pyrimidine nucleotides are 2′-deoxy-2′-fluoro pyrimidine nucleotides or alternately a plurality of pyrimidine nucleotides are 2′-deoxy-2′-fluoro pyrimidine nucleotides), and one or more purine nucleotides present in the sense region are 2′-deoxy purine nucleotides (e.g., wherein all purine nucleotides are 2′-deoxy purine nucleotides or alternately a plurality of purine nucleotides are 2′-deoxy purine nucleotides), and an antisense region, wherein one or more pyrimidine nucleotides present in the antisense region are 2′-deoxy-2′-fluoro pyrimidine nucleotides (e.g., wherein all pyrimidine nucleotides are 2′-deoxy-2′-fluoro pyrimidine nucleotides or alternately a plurality of pyrimidine nucleotides are 2′-deoxy-2′-fluoro pyrimidine nucleotides), and one or more purine nucleotides present in the antisense region are 2′-O-methyl purine nucleotides (e.g., wherein all purine nucleotides are 2′-O-methyl purine nucleotides or alternately a plurality of purine nucleotides are 2′-O-methyl purine nucleotides). The sense region and/or the antisense region can have a terminal cap modification, such as any modification described herein or shown in FIG. 10, that is optionally present at the 3′-end, the 5′-end, or both of the 3′ and 5′-ends of the sense and/or antisense sequence. The sense and/or antisense region can optionally further comprise a 3′-terminal nucleotide overhang having about 1 to about 4 (e.g., about 1, 2, 3, or 4) 2′-deoxynucleotides. The overhang nucleotides can further comprise one or more (e.g., about 1, 2, 3, 4 or more) phosphorothioate, phosphonoacetate, and/or thiophosphonoacetate internucleotide linkages. Non-limiting examples of these chemically-modified siNAs are shown in FIGS. 4 and 5 and Tables III and IV herein. In any of these described embodiments, the purine nucleotides present in the sense region are alternatively 2′-O-methyl purine nucleotides (e.g., wherein all purine nucleotides are 2′-O-methyl purine nucleotides or alternately a plurality of purine nucleotides are 2′-O-methyl purine nucleotides) and one or more purine nucleotides present in the antisense region are 2′-O-methyl purine nucleotides (e.g., wherein all purine nucleotides are 2′-O-methyl purine nucleotides or alternately a plurality of purine nucleotides are 2′-O-methyl purine nucleotides). Also, in any of these embodiments, one or more purine nucleotides present in the sense region are alternatively purine ribonucleotides (e.g., wherein all purine nucleotides are purine ribonucleotides or alternately a plurality of purine nucleotides are purine ribonucleotides) and any purine nucleotides present in the antisense region are 2′-O-methyl purine nucleotides (e.g., wherein all purine nucleotides are 2′-O-methyl purine nucleotides or alternately a plurality of purine nucleotides are 2′-O-methyl purine nucleotides). Additionally, in any of these embodiments, one or more purine nucleotides present in the sense region and/or present in the antisense region are alternatively selected from the group consisting of 2′-deoxy nucleotides, locked nucleic acid (LNA) nucleotides, 2′-methoxyethyl nucleotides, 4′-thionucleotides, and 2′-O-methyl nucleotides (e.g., wherein all purine nucleotides are selected from the group consisting of 2′-deoxy nucleotides, locked nucleic acid (LNA) nucleotides, 2′-methoxyethyl nucleotides, 4′-thionucleotides, and 2′-O-methyl nucleotides or alternately a plurality of purine nucleotides are selected from the group consisting of 2′-deoxy nucleotides, locked nucleic acid (LNA) nucleotides, 2′-methoxyethyl nucleotides, 4′-thionucleotides, and 2′-O-methyl nucleotides).

[0111] In another embodiment, any modified nucleotides present in the siNA molecules of the invention, preferably in the antisense strand of the siNA molecules of the invention, but also optionally in the sense and/or both antisense and sense strands, comprise modified nucleotides having properties or characteristics similar to naturally occurring ribonucleotides. For example, the invention features siNA molecules including modified nucleotides having a Northern conformation (e.g., Northern pseudorotation cycle, see for example Saenger, Principles of Nucleic Acid Structure, Springer-Verlag ed., 1984). As such, chemically modified nucleotides present in the siNA molecules of the invention, preferably in the antisense strand of the siNA molecules of the invention, but also optionally in the sense and/or both antisense and sense strands, are resistant to nuclease degradation while at the same time maintaining the capacity to mediate RNAi. Non-limiting examples of nucleotides having a northern configuration include locked nucleic acid (LNA) nucleotides (e.g., 2′-O, 4′-C-methylene-(D-ribofuranosyl) nucleotides); 2′-methoxyethoxy (MOE) nucleotides; 2′-methyl-thio-ethyl, 2′-deoxy-2′-fluoro nucleotides, 2′-deoxy-2′-chloro nucleotides, 2′-azido nucleotides, and 2′-O-methyl nucleotides.

[0112] In one embodiment, the sense strand of a double stranded siNA molecule of the invention comprises a terminal cap moiety, (see for example FIG. 10) such as an inverted deoxyabaisc moiety, at the 3′-end, 5′-end, or both 3′ and 5′-ends of the sense strand.

[0113] In one embodiment, the invention features a chemically-modified short interfering nucleic acid molecule (siNA) capable of mediating RNA interference (RNAI) against BACE inside a cell or reconstituted in vitro system, wherein the chemical modification comprises a conjugate covalently attached to the chemically-modified siNA molecule. Non-limiting examples of conjugates contemplated by the invention include conjugates and ligands described in Vargeese et al., U.S. Ser. No. 10/427,160, filed Apr. 30, 2003, incorporated by reference herein in its entirety, including the drawings. In another embodiment, the conjugate is covalently attached to the chemically-modified siNA molecule via a biodegradable linker. In one embodiment, the conjugate molecule is attached at the 3′-end of either the sense strand, the antisense strand, or both strands of the chemically-modified siNA molecule. In another embodiment, the conjugate molecule is attached at the 5′-end of either the sense strand, the antisense strand, or both strands of the chemically-modified siNA molecule. In yet another embodiment, the conjugate molecule is attached both the 3′-end and 5′-end of either the sense strand, the antisense strand, or both strands of the chemically-modified siNA molecule, or any combination thereof. In one embodiment, a conjugate molecule of the invention comprises a molecule that facilitates delivery of a chemically-modified siNA molecule into a biological system, such as a cell. In another embodiment, the conjugate molecule attached to the chemically-modified siNA molecule is a polyethylene glycol, human serum albumin, or a ligand for a cellular receptor that can mediate cellular uptake. Examples of specific conjugate molecules contemplated by the instant invention that can be attached to chemically-modified siNA molecules are described in Vargeese et al., U.S. Ser. No. 10/201,394, filed Jul. 22, 2002 incorporated by reference herein. The type of conjugates used and the extent of conjugation of siNA molecules of the invention can be evaluated for improved pharmacokinetic profiles, bioavailability, and/or stability of siNA constructs while at the same time maintaining the ability of the siNA to mediate RNAi activity. As such, one skilled in the art can screen siNA constructs that are modified with various conjugates to determine whether the siNA conjugate complex possesses improved properties while maintaining the ability to mediate RNAi, for example in animal models as are generally known in the art.

[0114] In one embodiment, the invention features a short interfering nucleic acid (siNA) molecule of the invention, wherein the siNA further comprises a nucleotide, non-nucleotide, or mixed nucleotide/non-nucleotide linker that joins the sense region of the siNA to the antisense region of the siNA. In one embodiment, a nucleotide linker of the invention can be a linker of ≧2 nucleotides in length, for example about 3, 4, 5, 6, 7, 8, 9, or 10 nucleotides in length. In another embodiment, the nucleotide linker can be a nucleic acid aptamer. By “aptamer” or “nucleic acid aptamer” as used herein is meant a nucleic acid molecule that binds specifically to a target molecule wherein the nucleic acid molecule has sequence that comprises a sequence recognized by the target molecule in its natural setting. Alternately, an aptamer can be a nucleic acid molecule that binds to a target molecule where the target molecule does not naturally bind to a nucleic acid. The target molecule can be any molecule of interest. For example, the aptamer can be used to bind to a ligand-binding domain of a protein, thereby preventing interaction of the naturally occurring ligand with the protein. This is a non-limiting example and those in the art will recognize that other embodiments can be readily generated using techniques generally known in the art. (See, for example, Gold et al., 1995, Annu. Rev. Biochem., 64, 763; Brody and Gold, 2000, J. Biotechnol., 74, 5; Sun, 2000, Curr. Opin. Mol. Ther., 2, 100; Kusser, 2000, J. Biotechnol., 74, 27; Hermann and Patel, 2000, Science, 287, 820; and Jayasena, 1999, Clinical Chemistry, 45, 1628.)

[0115] In yet another embodiment, a non-nucleotide linker of the invention comprises abasic nucleotide, polyether, polyamine, polyamide, peptide, carbohydrate, lipid, polyhydrocarbon, or other polymeric compounds (e.g. polyethylene glycols such as those having between 2 and 100 ethylene glycol units). Specific examples include those described by Seela and Kaiser, Nucleic Acids Res. 1990, 18:6353 and Nucleic Acids Res. 1987, 15:3113; Cload and Schepartz, J. Am. Chem. Soc. 1991, 113:6324; Richardson and Schepartz, J. Am. Chem. Soc. 1991, 113:5109; Ma et al., Nucleic Acids Res. 1993, 21:2585 and Biochemistry 1993, 32:1751; Durand et al., Nucleic Acids Res. 1990, 18:6353; McCurdy et al., Nucleosides & Nucleotides 1991, 10:287; Jschke et al., Tetrahedron Lett. 1993, 34:301; Ono et al., Biochemistry 1991, 30:9914; Arnold et al., International Publication No. WO 89/02439; Usman et al., International Publication No. WO 95/06731; Dudycz et al., International Publication No. WO 95/11910 and Ferentz and Verdine, J. Am. Chem. Soc. 1991, 113:4000, all hereby incorporated by reference herein. A “non-nucleotide” further means any group or compound that can be incorporated into a nucleic acid chain in the place of one or more nucleotide units, including either sugar and/or phosphate substitutions, and allows the remaining bases to exhibit their enzymatic activity. The group or compound can be abasic in that it does not contain a commonly recognized nucleotide base, such as adenosine, guanine, cytosine, uracil or thymine, for example at the C1 position of the sugar.

[0116] In one embodiment, the invention features a short interfering nucleic acid (siNA) molecule capable of mediating RNA interference (RNAi) inside a cell or reconstituted in vitro system, wherein one or both strands of the siNA molecule that are assembled from two separate oligonucleotides do not comprise any ribonucleotides. For example, a siNA molecule can be assembled from a single oligonculeotide where the sense and antisense regions of the siNA comprise separate oligonucleotides that do not have any ribonucleotides (e.g., nucleotides having a 2′-OH group) present in the oligonucleotides. In another example, a siNA molecule can be assembled from a single oligonculeotide where the sense and antisense regions of the siNA are linked or circularized by a nucleotide or non-nucleotide linker as described herein, wherein the oligonucleotide does not have any ribonucleotides (e.g., nucleotides having a 2′-OH group) present in the oligonucleotide. Applicant has surprisingly found that the presense of ribonucleotides (e.g., nucleotides having a 2′-hydroxyl group) within the siNA molecule is not required or essential to support RNAi activity. As such, in one embodiment, all positions within the siNA can include chemically modified nucleotides and/or non-nucleotides such as nucleotides and or non-nucleotides having Formula I, II, III, IV, V, VI, or VII or any combination thereof to the extent that the ability of the siNA molecule to support RNAi activity in a cell is maintained.

[0117] In one embodiment, a siNA molecule of the invention is a single stranded siNA molecule that mediates RNAi activity in a cell or reconstituted in vitro system comprising a single stranded polynucleotide having complementarity to a target nucleic acid sequence. In another embodiment, the single stranded siNA molecule of the invention comprises a 5′-terminal phosphate group. In another embodiment, the single stranded siNA molecule of the invention comprises a 5′-terminal phosphate group and a 3′-terminal phosphate group (e.g., a 2′,3′-cyclic phosphate). In another embodiment, the single stranded siNA molecule of the invention comprises about 18 to about 29 (e.g., about 18, 19, 20, 21, 22, 23, 24, 25, 26, 27, 28, or 29) nucleotides. In yet another embodiment, the single stranded siNA molecule of the invention comprises one or more chemically modified nucleotides or non-nucleotides described herein. For example, all the positions within the siNA molecule can include chemically-modified nucleotides such as nucleotides having any of Formulae I-VII, or any combination thereof to the extent that the ability of the siNA molecule to support RNAi activity in a cell is maintained.

[0118] In one embodiment, a siNA molecule of the invention is a single stranded siNA molecule that mediates RNAi activity in a cell or reconstituted in vitro system comprising a single stranded polynucleotide having complementarity to a target nucleic acid sequence, wherein one or more pyrimidine nucleotides present in the siNA are 2′-deoxy-2′-fluoro pyrimidine nucleotides (e.g., wherein all pyrimidine nucleotides are 2′-deoxy-2′-fluoro pyrimidine nucleotides or alternately a plurality of pyrimidine nucleotides are 2′-deoxy-2′-fluoro pyrimidine nucleotides), and wherein any purine nucleotides present in the antisense region are 2′-O-methyl purine nucleotides (e.g., wherein all purine nucleotides are 2′-O-methyl purine nucleotides or alternately a plurality of purine nucleotides are 2′-O-methyl purine nucleotides), and a terminal cap modification, such as any modification described herein or shown in FIG. 10, that is optionally present at the 3′-end, the 5′-end, or both of the 3′ and 5′-ends of the antisense sequence. The siNA optionally further comprises about 1 to about 4 or more (e.g., about 1, 2, 3, 4 or more) terminal 2′-deoxynucleotides at the 3′-end of the siNA molecule, wherein the terminal nucleotides can further comprise one or more (e.g., 1, 2, 3, 4 or more) phosphorothioate, phosphonoacetate, and/or thiophosphonoacetate internucleotide linkages, and wherein the siNA optionally further comprises a terminal phosphate group, such as a 5′-terminal phosphate group. In any of these embodiments, any purine nucleotides present in the antisense region are alternatively 2′-deoxy purine nucleotides (e.g., wherein all purine nucleotides are 2′-deoxy purine nucleotides or alternately a plurality of purine nucleotides are 2′-deoxy purine nucleotides). Also, in any of these embodiments, any purine nucleotides present in the siNA (i.e., purine nucleotides present in the sense and/or antisense region) can alternatively be locked nucleic acid (LNA) nucleotides (e.g., wherein all purine nucleotides are LNA nucleotides or alternately a plurality of purine nucleotides are LNA nucleotides). Also, in any of these embodiments, any purine nucleotides present in the siNA are alternatively 2′-methoxyethyl purine nucleotides (e.g., wherein all purine nucleotides are 2′-methoxyethyl purine nucleotides or alternately a plurality of purine nucleotides are 2′-methoxyethyl purine nucleotides). In another embodiment, any modified nucleotides present in the single stranded siNA molecules of the invention comprise modified nucleotides having properties or characteristics similar to naturally occurring ribonucleotides. For example, the invention features siNA molecules including modified nucleotides having a Northern conformation (e.g., Northern pseudorotation cycle, see for example Saenger, Principles of Nucleic Acid Structure, Springer-Verlag ed., 1984). As such, chemically modified nucleotides present in the single stranded siNA molecules of the invention are preferably resistant to nuclease degradation while at the same time maintaining the capacity to mediate RNAi.

[0119] In one embodiment, the invention features a method for modulating the expression of a BACE gene within a cell comprising: (a) synthesizing a siNA molecule of the invention, which can be chemically-modified, wherein one of the siNA strands comprises a sequence complementary to RNA of the BACE gene; and (b) introducing the siNA molecule into a cell under conditions suitable to modulate the expression of the BACE gene in the cell.

[0120] In one embodiment, the invention features a method for modulating the expression of a BACE gene within a cell comprising: (a) synthesizing a siNA molecule of the invention, which can be chemically-modified, wherein one of the siNA strands comprises a sequence complementary to RNA of the BACE gene and wherein the sense strand sequence of the siNA comprises a sequence identical or substantially similar to the sequence of the target RNA; and (b) introducing the siNA molecule into a cell under conditions suitable to modulate the expression of the BACE gene in the cell.

[0121] In another embodiment, the invention features a method for modulating the expression of more than one BACE gene within a cell comprising: (a) synthesizing siNA molecules of the invention, which can be chemically-modified, wherein one of the siNA strands comprises a sequence complementary to RNA of the BACE genes; and (b) introducing the siNA molecules into a cell under conditions suitable to modulate the expression of the BACE genes in the cell.

[0122] In another embodiment, the invention features a method for modulating the expression of two or more BACE genes within a cell comprising: (a) synthesizing one or more siNA molecules of the invention, which can be chemically-modified, wherein the siNA strands comprise sequences complementary to RNA of the BACE genes and wherein the sense strand sequences of the siNAs comprise sequences identical or substantially similar to the sequences of the target RNAs; and (b) introducing the siNA molecules into a cell under conditions suitable to modulate the expression of the BACE genes in the cell.

[0123] In another embodiment, the invention features a method for modulating the expression of more than one BACE gene within a cell comprising: (a) synthesizing a siNA molecule of the invention, which can be chemically-modified, wherein one of the siNA strands comprises a sequence complementary to RNA of the BACE gene and wherein the sense strand sequence of the siNA comprises a sequence identical or substantially similar to the sequences of the target RNAs; and (b) introducing the siNA molecule into a cell under conditions suitable to modulate the expression of the BACE genes in the cell.

[0124] In one embodiment, siNA molecules of the invention are used as reagents in ex vivo applications. For example, siNA reagents are introduced into tissue or cells that are transplanted into a subject for therapeutic effect. The cells and/or tissue can be derived from an organism or subject that later receives the explant, or can be derived from another organism or subject prior to transplantation. The siNA molecules can be used to modulate the expression of one or more genes in the cells or tissue, such that the cells or tissue obtain a desired phenotype or are able to perform a function when transplanted in vivo. In one embodiment, certain target cells from a patient are extracted. These extracted cells are contacted with siNAs targeting a specific nucleotide sequence within the cells under conditions suitable for uptake of the siNAs by these cells (e.g. using delivery reagents such as cationic lipids, liposomes and the like or using techniques such as electroporation to facilitate the delivery of siNAs into cells). The cells are then reintroduced back into the same patient or other patients. In one embodiment, the invention features a method of modulating the expression of a BACE gene in a tissue explant comprising: (a) synthesizing a siNA molecule of the invention, which can be chemically-modified, wherein one of the siNA strands comprises a sequence complementary to RNA of the BACE gene; and (b) introducing the siNA molecule into a cell of the tissue explant derived from a particular organism under conditions suitable to modulate the expression of the BACE gene in the tissue explant. In another embodiment, the method further comprises introducing the tissue explant back into the organism the tissue was derived from or into another organism under conditions suitable to modulate the expression of the BACE gene in that organism.

[0125] In one embodiment, the invention features a method of modulating the expression of a BACE gene in a tissue explant comprising: (a) synthesizing a siNA molecule of the invention, which can be chemically-modified, wherein one of the siNA strands comprises a sequence complementary to RNA of the BACE gene and wherein the sense strand sequence of the siNA comprises a sequence identical or substantially similar to the sequence of the target RNA; and (b) introducing the siNA molecule into a cell of the tissue explant derived from a particular organism under conditions suitable to modulate the expression of the BACE gene in the tissue explant. In another embodiment, the method further comprises introducing the tissue explant back into the organism the tissue was derived from or into another organism under conditions suitable to modulate the expression of the BACE gene in that organism.

[0126] In another embodiment, the invention features a method of modulating the expression of more than one BACE gene in a tissue explant comprising: (a) synthesizing siNA molecules of the invention, which can be chemically-modified, wherein one of the siNA strands comprises a sequence complementary to RNA of the BACE genes; and (b) introducing the siNA molecules into a cell of the tissue explant derived from a particular organism under conditions suitable to modulate the expression of the BACE genes in the tissue explant. In another embodiment, the method further comprises introducing the tissue explant back into the organism the tissue was derived from or into another organism under conditions suitable to modulate the expression of the BACE genes in that organism.

[0127] In one embodiment, the invention features a method of modulating the expression of a BACE gene in a subject or organism comprising: (a) synthesizing a siNA molecule of the invention, which can be chemically-modified, wherein one of the siNA strands comprises a sequence complementary to RNA of the BACE gene; and (b) introducing the siNA molecule into the subject or organism under conditions suitable to modulate the expression of the BACE gene in the subject or organism. The level of BACE protein or RNA can be determined using various methods well-known in the art.

[0128] In another embodiment, the invention features a method of modulating the expression of more than one BACE gene in a subject or organism comprising: (a) synthesizing siNA molecules of the invention, which can be chemically-modified, wherein one of the siNA strands comprises a sequence complementary to RNA of the BACE genes; and (b) introducing the siNA molecules into the subject or organism under conditions suitable to modulate the expression of the BACE genes in the subject or organism. The level of BACE protein or RNA can be determined as is known in the art.

[0129] In one embodiment, the invention features a method for modulating the expression of a BACE gene within a cell comprising: (a) synthesizing a siNA molecule of the invention, which can be chemically-modified, wherein the siNA comprises a single stranded sequence having complementarity to RNA of the BACE gene; and (b) introducing the siNA molecule into a cell under conditions suitable to modulate the expression of the BACE gene in the cell.

[0130] In another embodiment, the invention features a method for modulating the expression of more than one BACE gene within a cell comprising: (a) synthesizing siNA molecules of the invention, which can be chemically-modified, wherein the siNA comprises a single stranded sequence having complementarity to RNA of the BACE gene; and (b) contacting the cell in vitro or in vivo with the siNA molecule under conditions suitable to modulate the expression of the BACE genes in the cell.

[0131] In one embodiment, the invention features a method of modulating the expression of a BACE gene in a tissue explant comprising: (a) synthesizing a siNA molecule of the invention, which can be chemically-modified, wherein the siNA comprises a single stranded sequence having complementarity to RNA of the BACE gene; and (b) contacting a cell of the tissue explant derived from a particular subject or organism with the siNA molecule under conditions suitable to modulate the expression of the BACE gene in the tissue explant. In another embodiment, the method further comprises introducing the tissue explant back into the subject or organism the tissue was derived from or into another subject or organism under conditions suitable to modulate the expression of the BACE gene in that subject or organism.

[0132] In another embodiment, the invention features a method of modulating the expression of more than one BACE gene in a tissue explant comprising: (a) synthesizing siNA molecules of the invention, which can be chemically-modified, wherein the siNA comprises a single stranded sequence having complementarity to RNA of the BACE gene; and (b) introducing the siNA molecules into a cell of the tissue explant derived from a particular subject or organism under conditions suitable to modulate the expression of the BACE genes in the tissue explant. In another embodiment, the method further comprises introducing the tissue explant back into the subject or organism the tissue was derived from or into another subject or organism under conditions suitable to modulate the expression of the BACE genes in that subject or organism.

[0133] In one embodiment, the invention features a method of modulating the expression of a BACE gene in a subject or organism comprising: (a) synthesizing a siNA molecule of the invention, which can be chemically-modified, wherein the siNA comprises a single stranded sequence having complementarity to RNA of the BACE gene; and (b) introducing the siNA molecule into the subject or organism under conditions suitable to modulate the expression of the BACE gene in the subject or organism.

[0134] In another embodiment, the invention features a method of modulating the expression of more than one BACE gene in a subject or organism comprising: (a) synthesizing siNA molecules of the invention, which can be chemically-modified, wherein the siNA comprises a single stranded sequence having complementarity to RNA of the BACE gene; and (b) introducing the siNA molecules into the subject or organism under conditions suitable to modulate the expression of the BACE genes in the subject or organism.

[0135] In one embodiment, the invention features a method of modulating the expression of a BACE gene in a subject or organism comprising contacting the subject or organism with a siNA molecule of the invention under conditions suitable to modulate the expression of the BACE gene in the subject or organism.

[0136] In one embodiment, the invention features a method for treating Alzheimer's disease in a subject or organism comprising contacting the subject or organism with a siNA molecule of the invention under conditions suitable to modulate the expression of the BACE gene in the subject or organism.

[0137] In one embodiment, the invention features a method for treating neurodegenerative disorders or conditions, such as dementia, in a subject or organism comprising contacting the subject or organism with a siNA molecule of the invention under conditions suitable to modulate the expression of the BACE gene in the subject or organism.

[0138] In one embodiment, the invention features a method for treating stroke/cardiovascular accident in a subject or organism comprising contacting the subject or organism with a siNA molecule of the invention under conditions suitable to modulate the expression of the BACE gene in the subject or organism.

[0139] In another embodiment, the invention features a method of modulating the expression of more than one BACE gene in a subject or organism comprising contacting the subject or organism with one or more siNA molecules of the invention under conditions suitable to modulate the expression of the BACE genes in the subject or organism.

[0140] The siNA molecules of the invention can be designed to down regulate or inhibit target (e.g., BACE) gene expression through RNAi targeting of a variety of RNA molecules. In one embodiment, the siNA molecules of the invention are used to target various RNAs corresponding to a target gene. Non-limiting examples of such RNAs include messenger RNA (mRNA), alternate RNA splice variants of target gene(s), post-transcriptionally modified RNA of target gene(s), pre-mRNA of target gene(s), and/or RNA templates. If alternate splicing produces a family of transcripts that are distinguished by usage of appropriate exons, the instant invention can be used to inhibit gene expression through the appropriate exons to specifically inhibit or to distinguish among the functions of gene family members. For example, a protein that contains an alternatively spliced transmembrane domain can be expressed in both membrane bound and secreted forms. Use of the invention to target the exon containing the transmembrane domain can be used to determine the functional consequences of pharmaceutical targeting of membrane bound as opposed to the secreted form of the protein. Non-limiting examples of applications of the invention relating to targeting these RNA molecules include therapeutic pharmaceutical applications, pharmaceutical discovery applications, molecular diagnostic and gene function applications, and gene mapping, for example using single nucleotide polymorphism mapping with siNA molecules of the invention. Such applications can be implemented using known gene sequences or from partial sequences available from an expressed sequence tag (EST).

[0141] In another embodiment, the siNA molecules of the invention are used to target conserved sequences corresponding to a gene family or gene families such as BACE family genes. As such, siNA molecules targeting multiple BACE targets can provide increased therapeutic effect. In addition, siNA can be used to characterize pathways of gene function in a variety of applications. For example, the present invention can be used to inhibit the activity of target gene(s) in a pathway to determine the function of uncharacterized gene(s) in gene function analysis, mRNA function analysis, or translational analysis. The invention can be used to determine potential target gene pathways involved in various diseases and conditions toward pharmaceutical development. The invention can be used to understand pathways of gene expression involved in, for example, Alzheimer's disease and other neurodegenerative disorders or conditions, such as dementia, and stroke/cardiovascular accident.

[0142] In one embodiment, siNA molecule(s) and/or methods of the invention are used to down regulate the expression of gene(s) that encode RNA referred to by Genbank Accession, for example, BACE genes encoding RNA sequence(s) referred to herein by Genbank Accession number, for example, Genbank Accession Nos. shown in Table I.

[0143] In one embodiment, the invention features a method comprising: (a) generating a library of siNA constructs having a predetermined complexity; and (b) assaying the siNA constructs of (a) above, under conditions suitable to determine RNAi target sites within the target RNA sequence. In one embodiment, the siNA molecules of (a) have strands of a fixed length, for example, about 23 nucleotides in length. In another embodiment, the siNA molecules of (a) are of differing length, for example having strands of about 18 to about 25 (e.g., about 18, 19, 20, 21, 22, 23, 24, or 25) nucleotides in length. In one embodiment, the assay can comprise a reconstituted in vitro siNA assay as described herein. In another embodiment, the assay can comprise a cell culture system in which target RNA is expressed. In another embodiment, fragments of target RNA are analyzed for detectable levels of cleavage, for example by gel electrophoresis, northern blot analysis, or RNAse protection assays, to determine the most suitable target site(s) within the target RNA sequence. The target RNA sequence can be obtained as is known in the art, for example, by cloning and/or transcription for in vitro systems, and by cellular expression in in vivo systems.

[0144] In one embodiment, the invention features a method comprising: (a) generating a randomized library of siNA constructs having a predetermined complexity, such as of 4^{N}, where N represents the number of base paired nucleotides in each of the siNA construct strands (eg. for a siNA construct having 21 nucleotide sense and antisense strands with 19 base pairs, the complexity would be 4¹⁹); and (b) assaying the siNA constructs of (a) above, under conditions suitable to determine RNAi target sites within the target BACE RNA sequence. In another embodiment, the siNA molecules of (a) have strands of a fixed length, for example about 23 nucleotides in length. In yet another embodiment, the siNA molecules of (a) are of differing length, for example having strands of about 18 to about 25 (e.g., about 18, 19, 20, 21, 22, 23, 24, or 25) nucleotides in length. In one embodiment, the assay can comprise a reconstituted in vitro siNA assay as described in Example 7 herein. In another embodiment, the assay can comprise a cell culture system in which target RNA is expressed. In another embodiment, fragments of BACE RNA are analyzed for detectable levels of cleavage, for example, by gel electrophoresis, northern blot analysis, or RNAse protection assays, to determine the most suitable target site(s) within the target BACE RNA sequence. The target BACE RNA sequence can be obtained as is known in the art, for example, by cloning and/or transcription for in vitro systems, and by cellular expression in in vivo systems.

[0145] In another embodiment, the invention features a method comprising: (a) analyzing the sequence of a RNA target encoded by a target gene; (b) synthesizing one or more sets of siNA molecules having sequence complementary to one or more regions of the RNA of (a); and (c) assaying the siNA molecules of (b) under conditions suitable to determine RNAi targets within the target RNA sequence. In one embodiment, the siNA molecules of (b) have strands of a fixed length, for example about 23 nucleotides in length. In another embodiment, the siNA molecules of (b) are of differing length, for example having strands of about 18 to about 25 (e.g., about 18, 19, 20, 21, 22, 23, 24, or 25) nucleotides in length. In one embodiment, the assay can comprise a reconstituted in vitro siNA assay as described herein. In another embodiment, the assay can comprise a cell culture system in which target RNA is expressed. Fragments of target RNA are analyzed for detectable levels of cleavage, for example by gel electrophoresis, northern blot analysis, or RNAse protection assays, to determine the most suitable target site(s) within the target RNA sequence. The target RNA sequence can be obtained as is known in the art, for example, by cloning and/or transcription for in vitro systems, and by expression in in vivo systems.

[0146] By “target site” is meant a sequence within a target RNA that is “targeted” for cleavage mediated by a siNA construct which contains sequences within its antisense region that are complementary to the target sequence.

[0147] By “detectable level of cleavage” is meant cleavage of target RNA (and formation of cleaved product RNAs) to an extent sufficient to discern cleavage products above the background of RNAs produced by random degradation of the target RNA. Production of cleavage products from 1-5% of the target RNA is sufficient to detect above the background for most methods of detection.

[0148] In one embodiment, the invention features a composition comprising a siNA molecule of the invention, which can be chemically-modified, in a pharmaceutically acceptable carrier or diluent. In another embodiment, the invention features a pharmaceutical composition comprising siNA molecules of the invention, which can be chemically-modified, targeting one or more genes in a pharmaceutically acceptable carrier or diluent. In another embodiment, the invention features a method for diagnosing a disease or condition in a subject comprising administering to the subject a composition of the invention under conditions suitable for the diagnosis of the disease or condition in the subject. In another embodiment, the invention features a method for treating or preventing a disease or condition in a subject, comprising administering to the subject a composition of the invention under conditions suitable for the treatment or prevention of the disease or condition in the subject, alone or in conjunction with one or more other therapeutic compounds. In yet another embodiment, the invention features a method for treating Alzheimer's disease and/or other neurodegenerative disorders, such as dementia and stroke/cardiovascular accident in a subject comprising administering to the subject a composition of the invention under conditions suitable for the treatment of Alzheimer's disease and/or other neurodegenerative disorders, such as dementia and stroke/cardiovascular accident in the subject.

[0149] In another embodiment, the invention features a method for validating a BACE gene target, comprising: (a) synthesizing a siNA molecule of the invention, which can be chemically-modified, wherein one of the siNA strands includes a sequence complementary to RNA of a BACE target gene; (b) introducing the siNA molecule into a cell, tissue, subject or organism under conditions suitable for modulating expression of the BACE target gene in the cell, tissue, subject, or organism; and (c) determining the function of the gene by assaying for any phenotypic change in the cell, tissue, subject, or organism.

[0150] In another embodiment, the invention features a method for validating a BACE target comprising: (a) synthesizing a siNA molecule of the invention, which can be chemically-modified, wherein one of the siNA strands includes a sequence complementary to RNA of a BACE target gene; (b) introducing the siNA molecule into a biological system under conditions suitable for modulating expression of the BACE target gene in the biological system; and (c) determining the function of the gene by assaying for any phenotypic change in the biological system.

[0151] By “biological system” is meant, material, in a purified or unpurified form, from biological sources, including but not limited to human or animal, wherein the system comprises the components required for RNAi activity. The term “biological system” includes, for example, a cell, tissue, subject, or organism, or extract thereof. The term biological system also includes reconstituted RNAi systems that can be used in an in vitro setting.

[0152] By “phenotypic change” is meant any detectable change to a cell that occurs in response to contact or treatment with a nucleic acid molecule of the invention (e.g., siNA). Such detectable changes include, but are not limited to, changes in shape, size, proliferation, motility, protein expression or RNA expression or other physical or chemical changes as can be assayed by methods known in the art. The detectable change can also include expression of reporter genes/molecules such as Green Florescent Protein (GFP) or various tags that are used to identify an expressed protein or any other cellular component that can be assayed.

[0153] In one embodiment, the invention features a kit containing a siNA molecule of the invention, which can be chemically-modified, that can be used to modulate the expression of a BACE target gene in a biological system, including, for example, in a cell, tissue, subject, or organism. In another embodiment, the invention features a kit containing more than one siNA molecule of the invention, which can be chemically-modified, that can be used to modulate the expression of more than one BACE target gene in a biological system, including, for example, in a cell, tissue, subject, or organism.

[0154] In one embodiment, the invention features a cell containing one or more siNA molecules of the invention, which can be chemically-modified. In another embodiment, the cell containing a siNA molecule of the invention is a mammalian cell. In yet another embodiment, the cell containing a siNA molecule of the invention is a human cell.

[0155] In one embodiment, the synthesis of a siNA molecule of the invention, which can be chemically-modified, comprises: (a) synthesis of two complementary strands of the siNA molecule; (b) annealing the two complementary strands together under conditions suitable to obtain a double-stranded siNA molecule. In another embodiment, synthesis of the two complementary strands of the siNA molecule is by solid phase oligonucleotide synthesis. In yet another embodiment, synthesis of the two complementary strands of the siNA molecule is by solid phase tandem oligonucleotide synthesis.

[0156] In one embodiment, the invention features a method for synthesizing a siNA duplex molecule comprising: (a) synthesizing a first oligonucleotide sequence strand of the siNA molecule, wherein the first oligonucleotide sequence strand comprises a cleavable linker molecule that can be used as a scaffold for the synthesis of the second oligonucleotide sequence strand of the siNA; (b) synthesizing the second oligonucleotide sequence strand of siNA on the scaffold of the first oligonucleotide sequence strand, wherein the second oligonucleotide sequence strand further comprises a chemical moiety than can be used to purify the siNA duplex; (c) cleaving the linker molecule of (a) under conditions suitable for the two siNA oligonucleotide strands to hybridize and form a stable duplex; and (d) purifying the siNA duplex utilizing the chemical moiety of the second oligonucleotide sequence strand. In one embodiment, cleavage of the linker molecule in (c) above takes place during deprotection of the oligonucleotide, for example, under hydrolysis conditions using an alkylamine base such as methylamine. In one embodiment, the method of synthesis comprises solid phase synthesis on a solid support such as controlled pore glass (CPG) or polystyrene, wherein the first sequence of (a) is synthesized on a cleavable linker, such as a succinyl linker, using the solid support as a scaffold. The cleavable linker in (a) used as a scaffold for synthesizing the second strand can comprise similar reactivity as the solid support derivatized linker, such that cleavage of the solid support derivatized linker and the cleavable linker of (a) takes place concomitantly. In another embodiment, the chemical moiety of (b) that can be used to isolate the attached oligonucleotide sequence comprises a trityl group, for example a dimethoxytrityl group, which can be employed in a trityl-on synthesis strategy as described herein. In yet another embodiment, the chemical moiety, such as a dimethoxytrityl group, is removed during purification, for example, using acidic conditions.

[0157] In a further embodiment, the method for siNA synthesis is a solution phase synthesis or hybrid phase synthesis wherein both strands of the siNA duplex are synthesized in tandem using a cleavable linker attached to the first sequence which acts a scaffold for synthesis of the second sequence. Cleavage of the linker under conditions suitable for hybridization of the separate siNA sequence strands results in formation of the double-stranded siNA molecule.

[0158] In another embodiment, the invention features a method for synthesizing a siNA duplex molecule comprising: (a) synthesizing one oligonucleotide sequence strand of the siNA molecule, wherein the sequence comprises a cleavable linker molecule that can be used as a scaffold for the synthesis of another oligonucleotide sequence; (b) synthesizing a second oligonucleotide sequence having complementarity to the first sequence strand on the scaffold of (a), wherein the second sequence comprises the other strand of the double-stranded siNA molecule and wherein the second sequence further comprises a chemical moiety than can be used to isolate the attached oligonucleotide sequence; (c) purifying the product of (b) utilizing the chemical moiety of the second oligonucleotide sequence strand under conditions suitable for isolating the full-length sequence comprising both siNA oligonucleotide strands connected by the cleavable linker and under conditions suitable for the two siNA oligonucleotide strands to hybridize and form a stable duplex. In one embodiment, cleavage of the linker molecule in (c) above takes place during deprotection of the oligonucleotide, for example, under hydrolysis conditions. In another embodiment, cleavage of the linker molecule in (c) above takes place after deprotection of the oligonucleotide. In another embodiment, the method of synthesis comprises solid phase synthesis on a solid support such as controlled pore glass (CPG) or polystyrene, wherein the first sequence of (a) is synthesized on a cleavable linker, such as a succinyl linker, using the solid support as a scaffold. The cleavable linker in (a) used as a scaffold for synthesizing the second strand can comprise similar reactivity or differing reactivity as the solid support derivatized linker, such that cleavage of the solid support derivatized linker and the cleavable linker of (a) takes place either concomitantly or sequentially. In one embodiment, the chemical moiety of (b) that can be used to isolate the attached oligonucleotide sequence comprises a trityl group, for example a dimethoxytrityl group.

[0159] In another embodiment, the invention features a method for making a double-stranded siNA molecule in a single synthetic process comprising: (a) synthesizing an oligonucleotide having a first and a second sequence, wherein the first sequence is complementary to the second sequence, and the first oligonucleotide sequence is linked to the second sequence via a cleavable linker, and wherein a terminal 5′-protecting group, for example, a 5′-O-dimethoxytrityl group (5′-O-DMT) remains on the oligonucleotide having the second sequence; (b) deprotecting the oligonucleotide whereby the deprotection results in the cleavage of the linker joining the two oligonucleotide sequences; and (c) purifying the product of (b) under conditions suitable for isolating the double-stranded siNA molecule, for example using a trityl-on synthesis strategy as described herein.

[0160] In another embodiment, the method of synthesis of siNA molecules of the invention comprises the teachings of Scaringe et al., U.S. Pat. Nos. 5,889,136; 6,008,400; and 6,111,086, incorporated by reference herein in their entirety.

[0161] In one embodiment, the invention features siNA constructs that mediate RNAi against BACE, wherein the siNA construct comprises one or more chemical modifications, for example, one or more chemical modifications having any of Formulae I-VII or any combination thereof that increases the nuclease resistance of the siNA construct.

[0162] In another embodiment, the invention features a method for generating siNA molecules with increased nuclease resistance comprising (a) introducing nucleotides having any of Formula I-VII or any combination thereof into a siNA molecule, and (b) assaying the siNA molecule of step (a) under conditions suitable for isolating siNA molecules having increased nuclease resistance.

[0163] In one embodiment, the invention features siNA constructs that mediate RNAi against BACE, wherein the siNA construct comprises one or more chemical modifications described herein that modulates the binding affinity between the sense and antisense strands of the siNA construct.

[0164] In another embodiment, the invention features a method for generating siNA molecules with increased binding affinity between the sense and antisense strands of the siNA molecule comprising (a) introducing nucleotides having any of Formula I-VII or any combination thereof into a siNA molecule, and (b) assaying the siNA molecule of step (a) under conditions suitable for isolating siNA molecules having increased binding affinity between the sense and antisense strands of the siNA molecule.

[0165] In one embodiment, the invention features siNA constructs that mediate RNAi against BACE, wherein the siNA construct comprises one or more chemical modifications described herein that modulates the binding affinity between the antisense strand of the siNA construct and a complementary target RNA sequence within a cell.

[0166] In one embodiment, the invention features siNA constructs that mediate RNAi against BACE, wherein the siNA construct comprises one or more chemical modifications described herein that modulates the binding affinity between the antisense strand of the siNA construct and a complementary target DNA sequence within a cell.

[0167] In another embodiment, the invention features a method for generating siNA molecules with increased binding affinity between the antisense strand of the siNA molecule and a complementary target RNA sequence comprising (a) introducing nucleotides having any of Formula I-VII or any combination thereof into a siNA molecule, and (b) assaying the siNA molecule of step (a) under conditions suitable for isolating siNA molecules having increased binding affinity between the antisense strand of the siNA molecule and a complementary target RNA sequence.

[0168] In another embodiment, the invention features a method for generating siNA molecules with increased binding affinity between the antisense strand of the siNA molecule and a complementary target DNA sequence comprising (a) introducing nucleotides having any of Formula I-VII or any combination thereof into a siNA molecule, and (b) assaying the siNA molecule of step (a) under conditions suitable for isolating siNA molecules having increased binding affinity between the antisense strand of the siNA molecule and a complementary target DNA sequence.

[0169] In one embodiment, the invention features siNA constructs that mediate RNAi against BACE, wherein the siNA construct comprises one or more chemical modifications described herein that modulate the polymerase activity of a cellular polymerase capable of generating additional endogenous siNA molecules having sequence homology to the chemically-modified siNA construct.

[0170] In another embodiment, the invention features a method for generating siNA molecules capable of mediating increased polymerase activity of a cellular polymerase capable of generating additional endogenous siNA molecules having sequence homology to a chemically-modified siNA molecule comprising (a) introducing nucleotides having any of Formula I-VII or any combination thereof into a siNA molecule, and (b) assaying the siNA molecule of step (a) under conditions suitable for isolating siNA molecules capable of mediating increased polymerase activity of a cellular polymerase capable of generating additional endogenous siNA molecules having sequence homology to the chemically-modified siNA molecule.

[0171] In one embodiment, the invention features chemically-modified siNA constructs that mediate RNAi against BACE in a cell, wherein the chemical modifications do not significantly effect the interaction of siNA with a target RNA molecule, DNA molecule and/or proteins or other factors that are essential for RNAi in a manner that would decrease the efficacy of RNAi mediated by such siNA constructs.

[0172] In another embodiment, the invention features a method for generating siNA molecules with improved RNAi activity against BACE comprising (a) introducing nucleotides having any of Formula I-VII or any combination thereof into a siNA molecule, and (b) assaying the siNA molecule of step (a) under conditions suitable for isolating siNA molecules having improved RNAi activity.

[0173] In yet another embodiment, the invention features a method for generating siNA molecules with improved RNAi activity against BACE target RNA comprising (a) introducing nucleotides having any of Formula I-VII or any combination thereof into a siNA molecule, and (b) assaying the siNA molecule of step (a) under conditions suitable for isolating siNA molecules having improved RNAi activity against the target RNA.

[0174] In yet another embodiment, the invention features a method for generating siNA molecules with improved RNAi activity against BACE target DNA comprising (a) introducing nucleotides having any of Formula I-VII or any combination thereof into a siNA molecule, and (b) assaying the siNA molecule of step (a) under conditions suitable for isolating siNA molecules having improved RNAi activity against the target DNA.

[0175] In one embodiment, the invention features siNA constructs that mediate RNAi against BACE, wherein the siNA construct comprises one or more chemical modifications described herein that modulates the cellular uptake of the siNA construct.

[0176] In another embodiment, the invention features a method for generating siNA molecules against BACE with improved cellular uptake comprising (a) introducing nucleotides having any of Formula I-VII or any combination thereof into a siNA molecule, and (b) assaying the siNA molecule of step (a) under conditions suitable for isolating siNA molecules having improved cellular uptake.

[0177] In one embodiment, the invention features siNA constructs that mediate RNAi against BACE, wherein the siNA construct comprises one or more chemical modifications described herein that increases the bioavailability of the siNA construct, for example, by attaching polymeric conjugates such as polyethyleneglycol or equivalent conjugates that improve the pharmacokinetics of the siNA construct, or by attaching conjugates that target specific tissue types or cell types in vivo. Non-limiting examples of such conjugates are described in Vargeese et al., U.S. Ser. No. 10/201,394 incorporated by reference herein.

[0178] In one embodiment, the invention features a method for generating siNA molecules of the invention with improved bioavailability comprising (a) introducing a conjugate into the structure of a siNA molecule, and (b) assaying the siNA molecule of step (a) under conditions suitable for isolating siNA molecules having improved bioavailability. Such conjugates can include ligands for cellular receptors, such as peptides derived from naturally occurring protein ligands; protein localization sequences, including cellular ZIP code sequences; antibodies; nucleic acid aptamers; vitamins and other co-factors, such as folate and N-acetylgalactosamine; polymers, such as polyethyleneglycol (PEG); phospholipids; cholesterol; polyamines, such as spermine or spermidine; and others.

[0179] In one embodiment, the invention features a double stranded short interfering nucleic acid (siNA) molecule that comprises a first nucleotide sequence complementary to a target RNA sequence or a portion thereof, and a second sequence having complementarity to said first sequence, wherein said second sequence is chemically modified in a manner that it can no longer act as a guide sequence for efficiently mediating RNA interference and/or be recognized by cellular proteins that facilitate RNAi.

[0180] In one embodiment, the invention features a double stranded short interfering nucleic acid (siNA) molecule that comprises a first nucleotide sequence complementary to a target RNA sequence or a portion thereof, and a second sequence having complementarity to said first sequence, wherein the second sequence is designed or modified in a manner that prevents its entry into the RNAi pathway as a guide sequence or as a sequence that is complementary to a target nucleic acid (e.g., RNA) sequence. Such design or modifications are expected to enhance the activity of siNA and/or improve the specificity of siNA molecules of the invention. These modifications are also expected to minimize any off-target effects and/or associated toxicity.

[0181] In one embodiment, the invention features a double stranded short interfering nucleic acid (siNA) molecule that comprises a first nucleotide sequence complementary to a target RNA sequence or a portion thereof, and a second sequence having complementarity to said first sequence, wherein said second sequence is incapable of acting as a guide sequence for mediating RNA interference.

[0182] In one embodiment, the invention features a double stranded short interfering nucleic acid (siNA) molecule that comprises a first nucleotide sequence complementary to a target RNA sequence or a portion thereof, and a second sequence having complementarity to said first sequence, wherein said second sequence does not have a terminal 5′-hydroxyl (5′-OH) or 5′-phosphate group.

[0183] In one embodiment, the invention features a double stranded short interfering nucleic acid (siNA) molecule that comprises a first nucleotide sequence complementary to a target RNA sequence or a portion thereof, and a second sequence having complementarity to said first sequence, wherein said second sequence comprises a terminal cap moiety at the 5′-end of said second sequence. In one embodiment, the terminal cap moiety comprises an inverted abasic, inverted deoxy abasic, inverted nucleotide moiety, a group shown in FIG. 10, an alkyl or cycloalkyl group, a heterocycle, or any other group that prevents RNAi activity in which the second sequence serves as a guide sequence or template for RNAi.

[0184] In one embodiment, the invention features a double stranded short interfering nucleic acid (siNA) molecule that comprises a first nucleotide sequence complementary to a target RNA sequence or a portion thereof, and a second sequence having complementarity to said first sequence, wherein said second sequence comprises a terminal cap moiety at the 5′-end and 3′-end of said second sequence. In one embodiment, each terminal cap moiety individually comprises an inverted abasic, inverted deoxy abasic, inverted nucleotide moiety, a group shown in FIG. 10, an alkyl or cycloalkyl group, a heterocycle, or any other group that prevents RNAi activity in which the second sequence serves as a guide sequence or template for RNAi.

[0185] In one embodiment, the invention features a method for generating siNA molecules of the invention with improved specificity for down regulating or inhibiting the expression of a target nucleic acid (e.g., a DNA or RNA such as a gene or its corresponding RNA), comprising (a) introducing one or more chemical modifications into the structure of a siNA molecule, and (b) assaying the siNA molecule of step (a) under conditions suitable for isolating siNA molecules having improved specificity. In another embodiment, the chemical modification used to improve specificity comprises terminal cap modifications at the 5′-end, 3′-end, or both 5′ and 3′-ends of the siNA molecule. The terminal cap modifications can comprise, for example, structures shown in FIG. 10 (e.g. inverted deoxyabasic moieties) or any other chemical modification that renders a portion of the siNA molecule (e.g. the sense strand) incapable of mediating RNA interference against an off target nucleic acid sequence. In a non-limiting example, a siNA molecule is designed such that only the antisense sequence of the siNA molecule can serve as a guide sequence for RISC mediated degradation of a corresponding target RNA sequence. This can be accomplished by rendering the sense sequence of the siNA inactive by introducing chemical modifications to the sense strand that preclude recognition of the sense strand as a guide sequence by RNAi machinery. In one embodiment, such chemical modifications comprise any chemical group at the 5′-end of the sense strand of the siNA, or any other group that serves to render the sense strand inactive as a guide sequence for mediating RNA interference. These modifications, for example, can result in a molecule where the 5′-end of the sense strand no longer has a free 5′-hydroxyl (5′-OH) or a free 5′-phosphate group (e.g., phosphate, diphosphate, triphosphate, cyclic phosphate etc.). Non-limiting examples of such siNA constructs are described herein, such as “Stab 9/10”, “Stab 7/8”, “Stab 7/19”, “Stab 17/22”, “Stab 23/24”, and “Stab 24/25” chemistries and variants thereof (see Table IV) wherein the 5′-end and 3′-end of the sense strand of the siNA do not comprise a hydroxyl group or phosphate group.

[0186] In one embodiment, the invention features a method for generating siNA molecules of the invention with improved specificity for down regulating or inhibiting the expression of a target nucleic acid (e.g., a DNA or RNA such as a gene or its corresponding RNA), comprising introducing one or more chemical modifications into the structure of a siNA molecule that prevent a strand or portion of the siNA molecule from acting as a template or guide sequence for RNAi activity. In one embodiment, the inactive strand or sense region of the siNA molecule is the sense strand or sense region of the siNA molecule, i.e. the strand or region of the siNA that does not have complementarity to the target nucleic acid sequence. In one embodiment, such chemical modifications comprise any chemical group at the 5′-end of the sense strand or region of the siNA that does not comprise a 5′-hydroxyl (5′-OH) or 5′-phosphate group, or any other group that serves to render the sense strand or sense region inactive as a guide sequence for mediating RNA interference. Non-limiting examples of such siNA constructs are described herein, such as “Stab 9/10”, “Stab 7/8”, “Stab 7/19”, “Stab 17/22”, “Stab 23/24”, and “Stab 24/25” chemistries and variants thereof (see Table IV) wherein the 5′-end and 3′-end of the sense strand of the siNA do not comprise a hydroxyl group or phosphate group.

[0187] In one embodiment, the invention features a method for screening siNA molecules that are active in mediating RNA interference against a target nucleic acid sequence comprising (a) generating a plurality of unmodified siNA molecules, (b) screening the siNA molecules of step (a) under conditions suitable for isolating siNA molecules that are active in mediating RNA interference against the target nucleic acid sequence, and (c) introducing chemical modifications (e.g. chemical modifications as described herein or as otherwise known in the art) into the active siNA molecules of (b). In one embodiment, the method further comprises re-screening the chemically modified siNA molecules of step (c) under conditions suitable for isolating chemically modified siNA molecules that are active in mediating RNA interference against the target nucleic acid sequence.

[0188] In one embodiment, the invention features a method for screening chemically modified siNA molecules that are active in mediating RNA interference against a target nucleic acid sequence comprising (a) generating a plurality of chemically modified siNA molecules (e.g. siNA molecules as described herein or as otherwise known in the art), and (b) screening the siNA molecules of step (a) under conditions suitable for isolating chemically modified siNA molecules that are active in mediating RNA interference against the target nucleic acid sequence.

[0189] The term “ligand” refers to any compound or molecule, such as a drug, peptide, hormone, or neurotransmitter, that is capable of interacting with another compound, such as a receptor, either directly or indirectly. The receptor that interacts with a ligand can be present on the surface of a cell or can alternately be an intercullular receptor. Interaction of the ligand with the receptor can result in a biochemical reaction, or can simply be a physical interaction or association.

[0190] In another embodiment, the invention features a method for generating siNA molecules of the invention with improved bioavailability comprising (a) introducing an excipient formulation to a siNA molecule, and (b) assaying the siNA molecule of step (a) under conditions suitable for isolating siNA molecules having improved bioavailability. Such excipients include polymers such as cyclodextrins, lipids, cationic lipids, polyamines, phospholipids, nanoparticles, receptors, ligands, and others.

[0191] In another embodiment, the invention features a method for generating siNA molecules of the invention with improved bioavailability comprising (a) introducing nucleotides having any of Formulae I-VII or any combination thereof into a siNA molecule, and (b) assaying the siNA molecule of step (a) under conditions suitable for isolating siNA molecules having improved bioavailability.

[0192] In another embodiment, polyethylene glycol (PEG) can be covalently attached to siNA compounds of the present invention. The attached PEG can be any molecular weight, preferably from about 2,000 to about 50,000 daltons (Da).

[0193] The present invention can be used alone or as a component of a kit having at least one of the reagents necessary to carry out the in vitro or in vivo introduction of RNA to test samples and/or subjects. For example, preferred components of the kit include a siNA molecule of the invention and a vehicle that promotes introduction of the siNA into cells of interest as described herein (e.g., using lipids and other methods of transfection known in the art, see for example Beigelman et al, U.S. Pat. No. 6,395,713). The kit can be used for target validation, such as in determining gene function and/or activity, or in drug optimization, and in drug discovery (see for example Usman et al., U.S. Ser. No. 60/402,996). Such a kit can also include instructions to allow a user of the kit to practice the invention.

[0194] The term “short interfering nucleic acid”, “siNA”, “short interfering RNA”, “siRNA”, “short interfering nucleic acid molecule”, “short interfering oligonucleotide molecule”, or “chemically-modified short interfering nucleic acid molecule” as used herein refers to any nucleic acid molecule capable of inhibiting or down regulating gene expression or viral replication, for example by mediating RNA interference “RNAi” or gene silencing in a sequence-specific manner; see for example Zamore et al., 2000, Cell, 101, 25-33; Bass, 2001, Nature, 411, 428-429; Elbashir et al., 2001, Nature, 411, 494-498; and Kreutzer et al., International PCT Publication No. WO 00/44895; Zernicka-Goetz et al., International PCT Publication No. WO 01/36646; Fire, International PCT Publication No. WO 99/32619; Plaetinck et al., International PCT Publication No. WO 00/01846; Mello and Fire, International PCT Publication No. WO 01/29058; Deschamps-Depaillette, International PCT Publication No. WO 99/07409; and Li et al., International PCT Publication No. WO 00/44914; Allshire, 2002, Science, 297, 1818-1819; Volpe et al., 2002, Science, 297, 1833-1837; Jenuwein, 2002, Science, 297, 2215-2218; and Hall et al., 2002, Science, 297, 2232-2237; Hutvagner and Zamore, 2002, Science, 297, 2056-60; McManus et al., 2002, RNA, 8, 842-850; Reinhart et al., 2002, Gene & Dev., 16, 1616-1626; and Reinhart & Bartel, 2002, Science, 297, 1831). Non limiting examples of siNA molecules of the invention are shown in FIGS. 4-6, and Tables II and III herein. For example the siNA can be a double-stranded polynucleotide molecule comprising self-complementary sense and antisense regions, wherein the antisense region comprises nucleotide sequence that is complementary to nucleotide sequence in a target nucleic acid molecule or a portion thereof and the sense region having nucleotide sequence corresponding to the target nucleic acid sequence or a portion thereof. The siNA can be assembled from two separate oligonucleotides, where one strand is the sense strand and the other is the antisense strand, wherein the antisense and sense strands are self-complementary (i.e. each strand comprises nucleotide sequence that is complementary to nucleotide sequence in the other strand; such as where the antisense strand and sense strand form a duplex or double stranded structure, for example wherein the double stranded region is about 19 base pairs); the antisense strand comprises nucleotide sequence that is complementary to nucleotide sequence in a target nucleic acid molecule or a portion thereof and the sense strand comprises nucleotide sequence corresponding to the target nucleic acid sequence or a portion thereof. Alternatively, the siNA is assembled from a single oligonucleotide, where the self-complementary sense and antisense regions of the siNA are linked by means of a nucleic acid based or non-nucleic acid-based linker(s). The siNA can be a polynucleotide with a duplex, asymmetric duplex, hairpin or asymmetric hairpin secondary structure, having self-complementary sense and antisense regions, wherein the antisense region comprises nucleotide sequence that is complementary to nucleotide sequence in a separate target nucleic acid molecule or a portion thereof and the sense region having nucleotide sequence corresponding to the target nucleic acid sequence or a portion thereof. The siNA can be a circular single-stranded polynucleotide having two or more loop structures and a stem comprising self-complementary sense and antisense regions, wherein the antisense region comprises nucleotide sequence that is complementary to nucleotide sequence in a target nucleic acid molecule or a portion thereof and the sense region having nucleotide sequence corresponding to the target nucleic acid sequence or a portion thereof, and wherein the circular polynucleotide can be processed either in vivo or in vitro to generate an active siNA molecule capable of mediating RNAi. The siNA can also comprise a single stranded polynucleotide having nucleotide sequence complementary to nucleotide sequence in a target nucleic acid molecule or a portion thereof (for example, where such siNA molecule does not require the presence within the siNA molecule of nucleotide sequence corresponding to the target nucleic acid sequence or a portion thereof), wherein the single stranded polynucleotide can further comprise a terminal phosphate group, such as a 5′-phosphate (see for example Martinez et al., 2002, Cell., 110, 563-574 and Schwarz et al., 2002, Molecular Cell, 10, 537-568), or 5′,3′-diphosphate. In certain embodiments, the siNA molecule of the invention comprises separate sense and antisense sequences or regions, wherein the sense and antisense regions are covalently linked by nucleotide or non-nucleotide linkers molecules as is known in the art, or are alternately non-covalently linked by ionic interactions, hydrogen bonding, van der waals interactions, hydrophobic interactions, and/or stacking interactions. In certain embodiments, the siNA molecules of the invention comprise nucleotide sequence that is complementary to nucleotide sequence of a target gene. In another embodiment, the siNA molecule of the invention interacts with nucleotide sequence of a target gene in a manner that causes inhibition of expression of the target gene. As used herein, siNA molecules need not be limited to those molecules containing only RNA, but further encompasses chemically-modified nucleotides and non-nucleotides. In certain embodiments, the short interfering nucleic acid molecules of the invention lack 2′-hydroxy (2′-OH) containing nucleotides. Applicant describes in certain embodiments short interfering nucleic acids that do not require the presence of nucleotides having a 2′-hydroxy group for mediating RNAi and as such, short interfering nucleic acid molecules of the invention optionally do not include any ribonucleotides (e.g., nucleotides having a 2′-OH group). Such siNA molecules that do not require the presence of ribonucleotides within the siNA molecule to support RNAi can however have an attached linker or linkers or other attached or associated groups, moieties, or chains containing one or more nucleotides with 2′-OH groups. Optionally, siNA molecules can comprise ribonucleotides at about 5, 10, 20, 30, 40, or 50% of the nucleotide positions. The modified short interfering nucleic acid molecules of the invention can also be referred to as short interfering modified oligonucleotides “siMON.” As used herein, the term siNA is meant to be equivalent to other terms used to describe nucleic acid molecules that are capable of mediating sequence specific RNAi, for example short interfering RNA (siRNA), double-stranded RNA (dsRNA), micro-RNA (miRNA), short hairpin RNA (shRNA), short interfering oligonucleotide, short interfering nucleic acid, short interfering modified oligonucleotide, chemically-modified siRNA, post-transcriptional gene silencing RNA (ptgsRNA), and others. In addition, as used herein, the term RNAi is meant to be equivalent to other terms used to describe sequence specific RNA interference, such as post transcriptional gene silencing, translational inhibition, or epigenetics. For example, siNA molecules of the invention can be used to epigenetically silence genes at both the post-transcriptional level or the pre-transcriptional level. In a non-limiting example, epigenetic regulation of gene expression by siNA molecules of the invention can result from siNA mediated modification of chromatin structure or methylation pattern to alter gene expression (see, for example, Verdel et al., 2004, Science, 303, 672-676; Pal-Bhadra et al., 2004, Science, 303, 669-672; Allshire, 2002, Science, 297, 1818-1819; Volpe et al., 2002, Science, 297, 1833-1837; Jenuwein, 2002, Science, 297, 2215-2218; and Hall et al., 2002, Science, 297, 2232-2237).

[0195] In one embodiment, a siNA molecule of the invention is a duplex forming oligonucleotide “DFO”, (see for example FIGS. 14-15 and Vaish et al., U.S. Ser. No. 10/727,780 filed Dec. 3, 2003 and International PCT Application No. US04/16390, filed May 24, 2004).

[0196] In one embodiment, a siNA molecule of the invention is a multifunctional siNA, (see for example FIGS. 16-21 and Jadhav et al., U.S. Ser. No. 60/543,480 filed Feb. 10, 2004 and International PCT Application No. US04/16390, filed May 24, 2004). The multifunctional siNA of the invention can comprise sequence targeting, for example, two regions of BACE RNA (see for example target sequences in Tables II and III).

[0197] By “asymmetric hairpin” as used herein is meant a linear siNA molecule comprising an antisense region, a loop portion that can comprise nucleotides or non-nucleotides, and a sense region that comprises fewer nucleotides than the antisense region to the extent that the sense region has enough complementary nucleotides to base pair with the antisense region and form a duplex with loop. For example, an asymmetric hairpin siNA molecule of the invention can comprise an antisense region having length sufficient to mediate RNAi in a cell or in vitro system (e.g. about 19 to about 22, or about 19, 20, 21, or 22 nucleotides) and a loop region comprising about 4 to about 8 (e.g., about 4, 5, 6, 7, or 8) nucleotides, and a sense region having about 3 to about 18 (e.g., about 3, 4, 5, 6, 7, 8, 9, 10, 11, 12, 13, 14, 15, 16, 17, or 18) nucleotides that are complementary to the antisense region. The asymmetric hairpin siNA molecule can also comprise a 5′-terminal phosphate group that can be chemically modified. The loop portion of the asymmetric hairpin siNA molecule can comprise nucleotides, non-nucleotides, linker molecules, or conjugate molecules as described herein.

[0198] By “asymmetric duplex” as used herein is meant a siNA molecule having two separate strands comprising a sense region and an antisense region, wherein the sense region comprises fewer nucleotides than the antisense region to the extent that the sense region has enough complementary nucleotides to base pair with the antisense region and form a duplex. For example, an asymmetric duplex siNA molecule of the invention can comprise an antisense region having length sufficient to mediate RNAi in a cell or in vitro system e.g. about 19 to about 22 (e.g. about 19, 20, 21, or 22) nucleotides and a sense region having about 3 to about 18 (e.g., about 3, 4, 5, 6, 7, 8, 9, 10, 11, 12, 13, 14, 15, 16, 17, or 18) nucleotides that are complementary to the antisense region.

[0199] By “modulate” is meant that the expression of the gene, or level of RNA molecule or equivalent RNA molecules encoding one or more proteins or protein subunits, or activity of one or more proteins or protein subunits is up regulated or down regulated, such that expression, level, or activity is greater than or less than that observed in the absence of the modulator. For example, the term “modulate” can mean “inhibit,” but the use of the word “modulate” is not limited to this definition.

[0200] By “inhibit”, “down-regulate”, or “reduce”, it is meant that the expression of the gene, or level of RNA molecules or equivalent RNA molecules encoding one or more proteins or protein subunits, or activity of one or more proteins or protein subunits, is reduced below that observed in the absence of the nucleic acid molecules (e.g., siNA) of the invention. In one embodiment, inhibition, down-regulation or reduction with an siNA molecule is below that level observed in the presence of an inactive or attenuated molecule. In another embodiment, inhibition, down-regulation, or reduction with siNA molecules is below that level observed in the presence of, for example, an siNA molecule with scrambled sequence or with mismatches. In another embodiment, inhibition, down-regulation, or reduction of gene expression with a nucleic acid molecule of the instant invention is greater in the presence of the nucleic acid molecule than in its absence. In one embodiment, inhibition, down regulation, or reduction of gene expression is associated with post transcriptional silencing, such as RNAi mediated cleavage of a target nucleic acid molecule (e.g. RNA) or inhibition of translation. In one embodiment, inhibition, down regulation, or reduction of gene expression is associated with pretranscriptional silencing.

[0201] By “gene”, or “target gene”, is meant, a nucleic acid that encodes an RNA, for example, nucleic acid sequences including, but not limited to, structural genes encoding a polypeptide. A gene or target gene can also encode a functional RNA (FRNA) or non-coding RNA (ncRNA), such as small temporal RNA (stRNA), micro RNA (miRNA), small nuclear RNA (snRNA), short interfering RNA (siRNA), small nucleolar RNA (snRNA), ribosomal RNA (rRNA), transfer RNA (tRNA) and precursor RNAs thereof. Such non-coding RNAs can serve as target nucleic acid molecules for siNA mediated RNA interference in modulating the activity of FRNA or ncRNA involved in functional or regulatory cellular processes. Abberant fRNA or ncRNA activity leading to disease can therefore be modulated by siNA molecules of the invention. siNA molecules targeting FRNA and ncRNA can also be used to manipulate or alter the genotype or phenotype of a subject, organism or cell, by intervening in cellular processes such as genetic imprinting, transcription, translation, or nucleic acid processing (e.g., transamination, methylation etc.). The target gene can be a gene derived from a cell, an endogenous gene, a transgene, or exogenous genes such as genes of a pathogen, for example a virus, which is present in the cell after infection thereof. The cell containing the target gene can be derived from or contained in any organism, for example a plant, animal, protozoan, virus, bacterium, or fungus. Non-limiting examples of plants include monocots, dicots, or gymnosperms. Non-limiting examples of animals include vertebrates or invertebrates. Non-limiting examples of fungi include molds or yeasts. For a review, see for example Snyder and Gerstein, 2003, Science, 300, 258-260.

[0202] By “non-canonical base pair” is meant any non-Watson Crick base pair, such as mismatches and/or wobble base pairs, inlcuding flipped mismatches, single hydrogen bond mismatches, trans-type mismatches, triple base interactions, and quadruple base interactions. Non-limiting examples of such non-canonical base pairs include, but are not limited to, AC reverse Hoogsteen, AC wobble, AU reverse Hoogsteen, GU wobble, AA N7 amino, CC 2-carbonyl-amino(H1)-N-3-amino(H2), GA sheared, UC 4-carbonyl-amino, UU imino-carbonyl, AC reverse wobble, AU Hoogsteen, AU reverse Watson Crick, CG reverse Watson Crick, GC N3-amino-amino N3, AA N1-amino symmetric, AA N7-amino symmetric, GA N7-N1 amino-carbonyl, GA+ carbonyl-amino N7-N1, GG N1-carbonyl symmetric, GG N3-amino symmetric, CC carbonyl-amino symmetric, CC N3-amino symmetric, UU 2-carbonyl-imino symmetric, UU 4-carbonyl-imino symmetric, AA amino-N3, AA Ni-amino, AC amino 2-carbonyl, AC N3-amino, AC N7-amino, AU amino-4-carbonyl, AU N1-imino, AU N3-imino, AU N7-imino, CC carbonyl-amino, GA amino-N1, GA amino-N7, GA carbonyl-amino, GA N3-amino, GC amino-N3, GC carbonyl-amino, GC N3-amino, GC N7-amino, GG amino-N7, GG carbonyl-imino, GG N7-amino, GU amino-2-carbonyl, GU carbonyl-imino, GU imino-2-carbonyl, GU N7-imino, psiU imino-2-carbonyl, UC 4-carbonyl-amino, UC imino-carbonyl, UU imino-4-carbonyl, AC C2-H-N3, GA carbonyl-C2-H, UU imino-4-carbonyl 2 carbonyl-C5-H, AC amino(A) N3(C)-carbonyl, GC imino amino-carbonyl, Gpsi imino-2-carbonyl amino-2-carbonyl, and GU imino amino-2-carbonyl base pairs.

[0203] By “BACE” or “beta secretase” as used herein is meant, BACE protein, peptide, or polypeptide having beta-secretase activity, such as that involved in generating beta-amyloid, for example, sequences encoded by BACE Genbank Accession Nos. shown in Table I. The term BACE also refers to nucleic acid sequences encoding any BACE protein, peptide, or polypeptide having BACE activity. The term “BACE” is also meant to include other BACE encoding sequence, such as BACE isoforms, mutant BACE genes, splice variants of BACE genes, and BACE gene polymorphisms.

[0204] By “APP” or “amyloid precursor protein” as used herein is meant any protein, peptide, or polypeptide that is processed to generate beta-amyloid. The term APP also refers to sequences that encode APP protein, for example, Genbank Accession Nos. shown in Table I. The term APP also refers to nucleic acid sequences encoding any APP protein, peptide, or polypeptide having APP activity. The term “APP” is also meant to include other APP encoding sequence, such as APP isoforms, mutant APP genes, splice variants of APP, and APP gene polymorphisms.

[0205] By “presenillin” or “PS”, i.e, “PS-1” or “PS-2”, or “PSEN”, i.e., “PSEN1” or “PSEN2”, as used herein is meant any protein, peptide, or polypeptide having gamma-secretase activity, such as that involved in generating beta-amyloid. The term PS also refers to sequences that encode presenillin protein, for example, PS-1 or PS-2, (i.e., Genbank Accession Nos. shown in Table I). The term “PS”, for example, “PS-1” or “PS-2”, also refers to nucleic acid sequences encoding any PS protein, peptide, or polypeptide having PS activity. The term “PS”, for example, “PS-1” or “PS-2”, is also meant to include other PS encoding sequence, such as PS isoforms, mutant PS genes, splice variants of PS, and PS gene polymorphisms.

[0206] By “PIN-1” as used herein is meant any protein, peptide, or polypeptide having peptidyl-prolyl cis/trans isomerase activity, such as those involved in the development of Neurofibrillary Tangles. The term PIN-1 also refers to sequences that encode PIN-1 protein, i.e., Genbank Accession Nos. shown in Table I. The term PIN-1 also refers to nucleic acid sequences encoding any PIN-1 protein, peptide, or polypeptide having PIN-1 activity. The term “PIN-1” is also meant to include other PIN-1 encoding sequence, such as PIN-1 isoforms, mutant PIN-1 genes, splice variants of PIN-1, and PIN-1 gene polymorphisms.

[0207] Furthermore, as discussed previously, all embodiments, compositions, methods, and uses described herein using BACE as an examplery gene are equally applicable to APP, PIN-1, and PS (i.e., PS-1, and PS-2) genes.

[0208] By “homologous sequence” is meant, a nucleotide sequence that is shared by one or more polynucleotide sequences, such as genes, gene transcripts and/or non-coding polynucleotides. For example, a homologous sequence can be a nucleotide sequence that is shared by two or more genes encoding related but different proteins, such as different members of a gene family, different protein epitopes, different protein isoforms or completely divergent genes, such as a cytokine and its corresponding receptors. A homologous sequence can be a nucleotide sequence that is shared by two or more non-coding polynucleotides, such as noncoding DNA or RNA, regulatory sequences, introns, and sites of transcriptional control or regulation. Homologous sequences can also include conserved sequence regions shared by more than one polynucleotide sequence. Homology does not need to be perfect homology (e.g., 100%), as partially homologous sequences are also contemplated by the instant invention (e.g., 99%, 98%, 97%, 96%, 95%, 94%, 93%, 92%, 91%, 90%, 89%, 88%, 87%, 86%, 85%, 84%, 83%, 82%, 81%, 80% etc.).

[0209] By “conserved sequence region” is meant, a nucleotide sequence of one or more regions in a polynucleotide does not vary significantly between generations or from one biological system, subject, or organism to another biological system, subject, or organism. The polynucleotide can include both coding and non-coding DNA and RNA.

[0210] By “sense region” is meant a nucleotide sequence of a siNA molecule having complementarity to an antisense region of the siNA molecule. In addition, the sense region of a siNA molecule can comprise a nucleic acid sequence having homology with a target nucleic acid sequence.

[0211] By “antisense region” is meant a nucleotide sequence of a siNA molecule having complementarity to a target nucleic acid sequence. In addition, the antisense region of a siNA molecule can optionally comprise a nucleic acid sequence having complementarity to a sense region of the siNA molecule.

[0212] By “target nucleic acid” is meant any nucleic acid sequence whose expression or activity is to be modulated. The target nucleic acid can be DNA or RNA.

[0213] By “complementarity” is meant that a nucleic acid can form hydrogen bond(s) with another nucleic acid sequence by either traditional Watson-Crick or other non-traditional types. In reference to the nucleic molecules of the present invention, the binding free energy for a nucleic acid molecule with its complementary sequence is sufficient to allow the relevant function of the nucleic acid to proceed, e.g., RNAi activity. Determination of binding free energies for nucleic acid molecules is well known in the art (see, e.g., Turner et al., 1987, CSH Symp. Quant. Biol. LII pp. 123-133; Frier et al., 1986, Proc. Nat. Acad. Sci. USA 83:9373-9377; Turner et al., 1987, J. Am. Chem. Soc. 109:3783-3785). A percent complementarity indicates the percentage of contiguous residues in a nucleic acid molecule that can form hydrogen bonds (e.g., Watson-Crick base pairing) with a second nucleic acid sequence (e.g., 5, 6, 7, 8, 9, or 10 nucleotides out of a total of 10 nucleotides in the first oligonucleotide being based paired to a second nucleic acid sequence having 10 nucleotides represents 50%, 60%, 70%, 80%, 90%, and 100% complementary respectively). “Perfectly complementary” means that all the contiguous residues of a nucleic acid sequence will hydrogen bond with the same number of contiguous residues in a second nucleic acid sequence.

[0214] In one embodiment, siNA molecules of the invention that down regulate or reduce BACE gene expression are used for treating Alzheimer's disease in a subject or organism.

[0215] In one embodiment, the siNA molecules of the invention are used to treat neurodegenerative disorders or conditions, such as dementia, and stroke/cardiovascular accident in a subject or organism.

[0216] In one embodiment of the present invention, each sequence of a siNA molecule of the invention is independently about 18 to about 24 nucleotides in length, in specific embodiments about 18, 19, 20, 21, 22, 23, or 24 nucleotides in length. In another embodiment, the siNA duplexes of the invention independently comprise about 17 to about 23 base pairs (e.g., about 17, 18, 19, 20, 21, 22, or 23). In yet another embodiment, siNA molecules of the invention comprising hairpin or circular structures are about 35 to about 55 (e.g., about 35, 40, 45, 50 or 55) nucleotides in length, or about 38 to about 44 (e.g., about 38, 39, 40, 41, 42, 43, or 44) nucleotides in length and comprising about 16 to about 22 (e.g., about 16, 17, 18, 19, 20, 21 or 22) base pairs. Exemplary siNA molecules of the invention are shown in Table II. Exemplary synthetic siNA molecules of the invention are shown in Table III and/or FIGS. 4-5.

[0217] As used herein “cell” is used in its usual biological sense, and does not refer to an entire multicellular organism, e.g., specifically does not refer to a human. The cell can be present in an organism, e.g., birds, plants and mammals such as humans, cows, sheep, apes, monkeys, swine, dogs, and cats. The cell can be prokaryotic (e.g., bacterial cell) or eukaryotic (e.g., mammalian or plant cell). The cell can be of somatic or germ line origin, totipotent or pluripotent, dividing or non-dividing. The cell can also be derived from or can comprise a gamete or embryo, a stem cell, or a fully differentiated cell.

[0218] The siNA molecules of the invention are added directly, or can be complexed with cationic lipids, packaged within liposomes, or otherwise delivered to target cells or tissues. The nucleic acid or nucleic acid complexes can be locally administered to relevant tissues ex vivo, or in vivo through direct dermal application, transdermal application, or injection, with or without their incorporation in biopolymers. In particular embodiments, the nucleic acid molecules of the invention comprise sequences shown in Tables II-III and/or FIGS. 4-5. Examples of such nucleic acid molecules consist essentially of sequences defined in these tables and figures. Furthermore, the chemically modified constructs described in Table IV can be applied to any siNA sequence of the invention.

[0219] In another aspect, the invention provides mammalian cells containing one or more siNA molecules of this invention. The one or more siNA molecules can independently be targeted to the same or different sites.

[0220] By “RNA” is meant a molecule comprising at least one ribonucleotide residue. By “ribonucleotide” is meant a nucleotide with a hydroxyl group at the 2′ position of a β-D-ribofuranose moiety. The terms include double-stranded RNA, single-stranded RNA, isolated RNA such as partially purified RNA, essentially pure RNA, synthetic RNA, recombinantly produced RNA, as well as altered RNA that differs from naturally occurring RNA by the addition, deletion, substitution and/or alteration of one or more nucleotides. Such alterations can include addition of non-nucleotide material, such as to the end(s) of the siNA or internally, for example at one or more nucleotides of the RNA. Nucleotides in the RNA molecules of the instant invention can also comprise non-standard nucleotides, such as non-naturally occurring nucleotides or chemically synthesized nucleotides or deoxynucleotides. These altered RNAs can be referred to as analogs or analogs of naturally-occurring RNA.

[0221] By “subject” is meant an organism, which is a donor or recipient of explanted cells or the cells themselves. “Subject” also refers to an organism to which the nucleic acid molecules of the invention can be administered. A subject can be a mammal or mammalian cells, including a human or human cells.

[0222] The term “phosphorothioate” as used herein refers to an internucleotide linkage having Formula I, wherein Z and/or W comprise a sulfur atom. Hence, the term phosphorothioate refers to both phosphorothioate and phosphorodithioate internucleotide linkages.

[0223] The term “phosphonoacetate” as used herein refers to an internucleotide linkage having Formula I, wherein Z and/or W comprise an acetyl or protected acetyl group.

[0224] The term “thiophosphonoacetate” as used herein refers to an internucleotide linkage having Formula I, wherein Z comprises an acetyl or protected acetyl group and W comprises a sulfur atom or alternately W comprises an acetyl or protected acetyl group and Z comprises a sulfur atom.

[0225] The term “universal base” as used herein refers to nucleotide base analogs that form base pairs with each of the natural DNA/RNA bases with little discrimination between them. Non-limiting examples of universal bases include C-phenyl, C-naphthyl and other aromatic derivatives, inosine, azole carboxamides, and nitroazole derivatives such as 3-nitropyrrole, 4-nitroindole, 5-nitroindole, and 6-nitroindole as known in the art (see for example Loakes, 2001, Nucleic Acids Research, 29, 2437-2447).

[0226] The term “acyclic nucleotide” as used herein refers to any nucleotide having an acyclic ribose sugar, for example where any of the ribose carbons (C1, C2, C3, C4, or C5), are independently or in combination absent from the nucleotide.

[0227] The nucleic acid molecules of the instant invention, individually, or in combination or in conjunction with other drugs, can be used to for preventing or treating Alzheimer's disease and other neurodegenerative disorders or conditions, such as dementia and stroke/cardiovascular accident in a subject or organism.

[0228] For example, the siNA molecules can be administered to a subject or can be administered to other appropriate cells evident to those skilled in the art, individually or in combination with one or more drugs under conditions suitable for the treatment.

[0229] In a further embodiment, the siNA molecules can be used in combination with other known treatments to prevent or treat Alzheimer's disease and other neurodegenerative disorders or conditions, such as dementia and stroke/cardiovascular accident in a subject or organism. For example, the described molecules could be used in combination with one or more known compounds, treatments, or procedures to prevent or treat Alzheimer's disease and other neurodegenerative disorders or conditions, such as dementia and stroke/cardiovascular accident in a subject or organism as are known in the art.

[0230] In one embodiment, the invention features an expression vector comprising a nucleic acid sequence encoding at least one siNA molecule of the invention, in a manner which allows expression of the siNA molecule. For example, the vector can contain sequence(s) encoding both strands of a siNA molecule comprising a duplex. The vector can also contain sequence(s) encoding a single nucleic acid molecule that is self-complementary and thus forms a siNA molecule. Non-limiting examples of such expression vectors are described in Paul et al., 2002, Nature Biotechnology, 19, 505; Miyagishi and Taira, 2002, Nature Biotechnology, 19, 497; Lee et al., 2002, Nature Biotechnology, 19, 500; and Novina et al., 2002, Nature Medicine, advance online publication doi: 10.1038/nm725.

[0231] In another embodiment, the invention features a mammalian cell, for example, a human cell, including an expression vector of the invention.

[0232] In yet another embodiment, the expression vector of the invention comprises a sequence for a siNA molecule having complementarity to a RNA molecule referred to by a Genbank Accession numbers, for example Genbank Accession Nos. shown in Table I.

[0233] In one embodiment, an expression vector of the invention comprises a nucleic acid sequence encoding two or more siNA molecules, which can be the same or different.

[0234] In another aspect of the invention, siNA molecules that interact with target RNA molecules and down-regulate gene encoding target RNA molecules (for example target RNA molecules referred to by Genbank Accession numbers herein) are expressed from transcription units inserted into DNA or RNA vectors. The recombinant vectors can be DNA plasmids or viral vectors. siNA expressing viral vectors can be constructed based on, but not limited to, adeno-associated virus, retrovirus, adenovirus, or alphavirus. The recombinant vectors capable of expressing the siNA molecules can be delivered as described herein, and persist in target cells. Alternatively, viral vectors can be used that provide for transient expression of siNA molecules. Such vectors can be repeatedly administered as necessary. Once expressed, the siNA molecules bind and down-regulate gene function or expression via RNA interference (RNAi). Delivery of siNA expressing vectors can be systemic, such as by intravenous or intramuscular administration, by administration to target cells ex-planted from a subject followed by reintroduction into the subject, or by any other means that would allow for introduction into the desired target cell.

[0235] By “vectors” is meant any nucleic acid- and/or viral-based technique used to deliver a desired nucleic acid.

[0236] Other features and advantages of the invention will be apparent from the following description of the preferred embodiments thereof, and from the claims.

### BRIEF DESCRIPTION OF THE DRAWINGS

[0237] FIG. 1 shows a non-limiting example of a scheme for the synthesis of siNA molecules. The complementary siNA sequence strands, strand 1 and strand 2, are synthesized in tandem and are connected by a cleavable linkage, such as a nucleotide succinate or abasic succinate, which can be the same or different from the cleavable linker used for solid phase synthesis on a solid support. The synthesis can be either solid phase or solution phase, in the example shown, the synthesis is a solid phase synthesis. The synthesis is performed such that a protecting group, such as a dimethoxytrityl group, remains intact on the terminal nucleotide of the tandem oligonucleotide. Upon cleavage and deprotection of the oligonucleotide, the two siNA strands spontaneously hybridize to form a siNA duplex, which allows the purification of the duplex by utilizing the properties of the terminal protecting group, for example by applying a trityl on purification method wherein only duplexes/oligonucleotides with the terminal protecting group are isolated.

[0238] FIG. 2 shows a MALDI-TOF mass spectrum of a purified siNA duplex synthesized by a method of the invention. The two peaks shown correspond to the predicted mass of the separate siNA sequence strands. This result demonstrates that the siNA duplex generated from tandem synthesis can be purified as a single entity using a simple trityl-on purification methodology.

[0239] FIG. 3 shows a non-limiting proposed mechanistic representation of target RNA degradation involved in RNAi. Double-stranded RNA (dsRNA), which is generated by RNA-dependent RNA polymerase (RdRP) from foreign single-stranded RNA, for example viral, transposon, or other exogenous RNA, activates the DICER enzyme that in turn generates siNA duplexes. Alternately, synthetic or expressed siNA can be introduced directly into a cell by appropriate means. An active siNA complex forms which recognizes a target RNA, resulting in degradation of the target RNA by the RISC endonuclease complex or in the synthesis of additional RNA by RNA-dependent RNA polymerase (RdRP), which can activate DICER and result in additional siNA molecules, thereby amplifying the RNAi response.

[0240] FIG. 4A-F shows non-limiting examples of chemically-modified siNA constructs of the present invention. In the figure, N stands for any nucleotide (adenosine, guanosine, cytosine, uridine, or optionally thymidine, for example thymidine can be substituted in the overhanging regions designated by parenthesis (N N). Various modifications are shown for the sense and antisense strands of the siNA constructs.

[0241] FIG. 4A: The sense strand comprises 21 nucleotides wherein the two terminal 3′-nucleotides are optionally base paired and wherein all nucleotides present are ribonucleotides except for (N N) nucleotides, which can comprise ribonucleotides, deoxynucleotides, universal bases, or other chemical modifications described herein. The antisense strand comprises 21 nucleotides, optionally having a 3′-terminal glyceryl moiety wherein the two terminal 3′-nucleotides are optionally complementary to the target RNA sequence, and wherein all nucleotides present are ribonucleotides except for (N N) nucleotides, which can comprise ribonucleotides, deoxynucleotides, universal bases, or other chemical modifications described herein. A modified internucleotide linkage, such as a phosphorothioate, phosphorodithioate or other modified internucleotide linkage as described herein, shown as “s”, optionally connects the (N N) nucleotides in the antisense strand.

[0242] FIG. 4B: The sense strand comprises 21 nucleotides wherein the two terminal 3′-nucleotides are optionally base paired and wherein all pyrimidine nucleotides that may be present are 2′deoxy-2′-fluoro modified nucleotides and all purine nucleotides that may be present are 2′-O-methyl modified nucleotides except for (N N) nucleotides, which can comprise ribonucleotides, deoxynucleotides, universal bases, or other chemical modifications described herein. The antisense strand comprises 21 nucleotides, optionally having a 3′-terminal glyceryl moiety and wherein the two terminal 3′-nucleotides are optionally complementary to the target RNA sequence, and wherein all pyrimidine nucleotides that may be present are 2′-deoxy-2′-fluoro modified nucleotides and all purine nucleotides that may be present are 2′-O-methyl modified nucleotides except for (N N) nucleotides, which can comprise ribonucleotides, deoxynucleotides, universal bases, or other chemical modifications described herein. A modified internucleotide linkage, such as a phosphorothioate, phosphorodithioate or other modified internucleotide linkage as described herein, shown as “s”, optionally connects the (N N) nucleotides in the sense and antisense strand.

[0243] FIG. 4C: The sense strand comprises 21 nucleotides having 5′- and 3′-terminal cap moieties wherein the two terminal 3′-nucleotides are optionally base paired and wherein all pyrimidine nucleotides that may be present are 2′-O-methyl or 2′-deoxy-2′-fluoro modified nucleotides except for (N N) nucleotides, which can comprise ribonucleotides, deoxynucleotides, universal bases, or other chemical modifications described herein. The antisense strand comprises 21 nucleotides, optionally having a 3′-terminal glyceryl moiety and wherein the two terminal 3′-nucleotides are optionally complementary to the target RNA sequence, and wherein all pyrimidine nucleotides that may be present are 2′-deoxy-2′-fluoro modified nucleotides except for (N N) nucleotides, which can comprise ribonucleotides, deoxynucleotides, universal bases, or other chemical modifications described herein. A modified internucleotide linkage, such as a phosphorothioate, phosphorodithioate or other modified internucleotide linkage as described herein, shown as “s”, optionally connects the (N N) nucleotides in the antisense strand.

[0244] FIG. 4D: The sense strand comprises 21 nucleotides having 5′- and 3′-terminal cap moieties wherein the two terminal 3′-nucleotides are optionally base paired and wherein all pyrimidine nucleotides that may be present are 2′-deoxy-2′-fluoro modified nucleotides except for (N N) nucleotides, which can comprise ribonucleotides, deoxynucleotides, universal bases, or other chemical modifications described herein and wherein and all purine nucleotides that may be present are 2′-deoxy nucleotides. The antisense strand comprises 21 nucleotides, optionally having a 3′-terminal glyceryl moiety and wherein the two terminal 3′-nucleotides are optionally complementary to the target RNA sequence, wherein all pyrimidine nucleotides that may be present are 2′-deoxy-2′-fluoro modified nucleotides and all purine nucleotides that may be present are 2′-O-methyl modified nucleotides except for (N N) nucleotides, which can comprise ribonucleotides, deoxynucleotides, universal bases, or other chemical modifications described herein. A modified internucleotide linkage, such as a phosphorothioate, phosphorodithioate or other modified internucleotide linkage as described herein, shown as “s”, optionally connects the (N N) nucleotides in the antisense strand.

[0245] FIG. 4E: The sense strand comprises 21 nucleotides having 5′- and 3′-terminal cap moieties wherein the two terminal 3′-nucleotides are optionally base paired and wherein all pyrimidine nucleotides that may be present are 2′-deoxy-2′-fluoro modified nucleotides except for (N N) nucleotides, which can comprise ribonucleotides, deoxynucleotides, universal bases, or other chemical modifications described herein. The antisense strand comprises 21 nucleotides, optionally having a 3′-terminal glyceryl moiety and wherein the two terminal 3′-nucleotides are optionally complementary to the target RNA sequence, and wherein all pyrimidine nucleotides that may be present are 2′-deoxy-2′-fluoro modified nucleotides and all purine nucleotides that may be present are 2′-O-methyl modified nucleotides except for (N N) nucleotides, which can comprise ribonucleotides, deoxynucleotides, universal bases, or other chemical modifications described herein. A modified internucleotide linkage, such as a phosphorothioate, phosphorodithioate or other modified internucleotide linkage as described herein, shown as “s”, optionally connects the (N N) nucleotides in the antisense strand.

[0246] FIG. 4F: The sense strand comprises 21 nucleotides having 5′- and 3′-terminal cap moieties wherein the two terminal 3′-nucleotides are optionally base paired and wherein all pyrimidine nucleotides that may be present are 2′-deoxy-2′-fluoro modified nucleotides except for (N N) nucleotides, which can comprise ribonucleotides, deoxynucleotides, universal bases, or other chemical modifications described herein and wherein and all purine nucleotides that may be present are 2′-deoxy nucleotides. The antisense strand comprises 21 nucleotides, optionally having a 3′-terminal glyceryl moiety and wherein the two terminal 3′-nucleotides are optionally complementary to the target RNA sequence, and having one 3′-terminal phosphorothioate internucleotide linkage and wherein all pyrimidine nucleotides that may be present are 2′-deoxy-2′-fluoro modified nucleotides and all purine nucleotides that may be present are 2′-deoxy nucleotides except for (N N) nucleotides, which can comprise ribonucleotides, deoxynucleotides, universal bases, or other chemical modifications described herein. A modified internucleotide linkage, such as a phosphorothioate, phosphorodithioate or other modified internucleotide linkage as described herein, shown as “s”, optionally connects the (N N) nucleotides in the antisense strand. The antisense strand of constructs A-F comprise sequence complementary to any target nucleic acid sequence of the invention. Furthermore, when a glyceryl moiety (L) is present at the 3′-end of the antisense strand for any construct shown in FIG. 4A-F, the modified internucleotide linkage is optional.

[0247] FIG. 5A-F shows non-limiting examples of specific chemically-modified siNA sequences of the invention. A-F applies the chemical modifications described in FIG. 4A-F to a BACE siNA sequence. Such chemical modifications can be applied to any BACE sequence and/or BACE polymorphism sequence.

[0248] FIG. 6 shows non-limiting examples of different siNA constructs of the invention. The examples shown (constructs 1, 2, and 3) have 19 representative base pairs; however, different embodiments of the invention include any number of base pairs described herein. Bracketed regions represent nucleotide overhangs, for example, comprising about 1, 2, 3, or 4 nucleotides in length, preferably about 2 nucleotides. Constructs 1 and 2 can be used independently for RNAi activity. Construct 2 can comprise a polynucleotide or non-nucleotide linker, which can optionally be designed as a biodegradable linker. In one embodiment, the loop structure shown in construct 2 can comprise a biodegradable linker that results in the formation of construct 1 in vivo and/or in vitro. In another example, construct 3 can be used to generate construct 2 under the same principle wherein a linker is used to generate the active siNA construct 2 in vivo and/or in vitro, which can optionally utilize another biodegradable linker to generate the active siNA construct 1 in vivo and/or in vitro. As such, the stability and/or activity of the siNA constructs can be modulated based on the design of the siNA construct for use in vivo or in vitro and/or in vitro.

[0249] FIG. 7A-C is a diagrammatic representation of a scheme utilized in generating an expression cassette to generate siNA hairpin constructs.

[0250] FIG. 7A: A DNA oligomer is synthesized with a 5′-restriction site (R1) sequence followed by a region having sequence identical (sense region of siNA) to a predetermined BACE target sequence, wherein the sense region comprises, for example, about 19, 20, 21, or 22 nucleotides (N) in length, which is followed by a loop sequence of defined sequence (X), comprising, for example, about 3 to about 10 nucleotides.

[0251] FIG. 7B: The synthetic construct is then extended by DNA polymerase to generate a hairpin structure having self-complementary sequence that will result in a siNA transcript having specificity for a BACE target sequence and having self-complementary sense and antisense regions.

[0252] FIG. 7C: The construct is heated (for example to about 95° C.) to linearize the sequence, thus allowing extension of a complementary second DNA strand using a primer to the 3′-restriction sequence of the first strand. The double-stranded DNA is then inserted into an appropriate vector for expression in cells. The construct can be designed such that a 3′-terminal nucleotide overhang results from the transcription, for example, by engineering restriction sites and/or utilizing a poly-U termination region as described in Paul et al., 2002, Nature Biotechnology, 29, 505-508.

[0253] FIG. 8A-C is a diagrammatic representation of a scheme utilized in generating an expression cassette to generate double-stranded siNA constructs.

[0254] FIG. 8A: A DNA oligomer is synthesized with a 5′-restriction (R1) site sequence followed by a region having sequence identical (sense region of siNA) to a predetermined BACE target sequence, wherein the sense region comprises, for example, about 19, 20, 21, or 22 nucleotides (N) in length, and which is followed by a 3′-restriction site (R2) which is adjacent to a loop sequence of defined sequence (X).

[0255] FIG. 8B: The synthetic construct is then extended by DNA polymerase to generate a hairpin structure having self-complementary sequence.

[0256] FIG. 8C: The construct is processed by restriction enzymes specific to R1 and R2 to generate a double-stranded DNA which is then inserted into an appropriate vector for expression in cells. The transcription cassette is designed such that a U6 promoter region flanks each side of the dsDNA which generates the separate sense and antisense strands of the siNA. Poly T termination sequences can be added to the constructs to generate U overhangs in the resulting transcript.

[0257] FIG. 9A-E is a diagrammatic representation of a method used to determine target sites for siNA mediated RNAi within a particular target nucleic acid sequence, such as messenger RNA.

[0258] FIG. 9A: A pool of siNA oligonucleotides are synthesized wherein the antisense region of the siNA constructs has complementarity to target sites across the target nucleic acid sequence, and wherein the sense region comprises sequence complementary to the antisense region of the siNA.

[0259] FIGS. 9B&C: (FIG. 9B) The sequences are pooled and are inserted into vectors such that (FIG. 9C) transfection of a vector into cells results in the expression of the siNA.

[0260] FIG. 9D: Cells are sorted based on phenotypic change that is associated with modulation of the target nucleic acid sequence.

[0261] FIG. 9E: The siNA is isolated from the sorted cells and is sequenced to identify efficacious target sites within the target nucleic acid sequence.

[0262] FIG. 10 shows non-limiting examples of different stabilization chemistries (1-10) that can be used, for example, to stabilize the 3′-end of siNA sequences of the invention, including (1) [3-3′]-inverted deoxyribose; (2) deoxyribonucleotide; (3) [5′-3′]-3′-deoxyribonucleotide; (4) [5′-3′]-ribonucleotide; (5) [5′-3′]-3′-O-methyl ribonucleotide; (6) 3′-glyceryl; (7) [3′-5′]-3′-deoxyribonucleotide; (8) [3′-3′]-deoxyribonucleotide; (9) [5′-2′]-deoxyribonucleotide; and (10) [5-3′]-dideoxyribonucleotide. In addition to modified and unmodified backbone chemistries indicated in the figure, these chemistries can be combined with different backbone modifications as described herein, for example, backbone modifications having Formula I. In addition, the 2′-deoxy nucleotide shown 5′ to the terminal modifications shown can be another modified or unmodified nucleotide or non-nucleotide described herein, for example modifications having any of Formulae I-VII or any combination thereof.

[0263] FIG. 11 shows a non-limiting example of a strategy used to identify chemically modified siNA constructs of the invention that are nuclease resistance while preserving the ability to mediate RNAi activity. Chemical modifications are introduced into the siNA construct based on educated design parameters (e.g. introducing 2′-mofications, base modifications, backbone modifications, terminal cap modifications etc). The modified construct in tested in an appropriate system (e.g. human serum for nuclease resistance, shown, or an animal model for PK/delivery parameters). In parallel, the siNA construct is tested for RNAi activity, for example in a cell culture system such as a luciferase reporter assay). Lead siNA constructs are then identified which possess a particular characteristic while maintaining RNAi activity, and can be further modified and assayed once again. This same approach can be used to identify siNA-conjugate molecules with improved pharmacokinetic profiles, delivery, and RNAi activity.

[0264] FIG. 12 shows non-limiting examples of phosphorylated siNA molecules of the invention, including linear and duplex constructs and asymmetric derivatives thereof.

[0265] FIG. 13 shows non-limiting examples of chemically modified terminal phosphate groups of the invention.

[0266] FIG. 14A shows a non-limiting example of methodology used to design self complementary DFO constructs utilizing palidrome and/or repeat nucleic acid sequences that are identified in a target nucleic acid sequence. (i) A palindrome or repeat sequence is identified in a nucleic acid target sequence. (ii) A sequence is designed that is complementary to the target nucleic acid sequence and the palindrome sequence. (iii) An inverse repeat sequence of the non-palindrome/repeat portion of the complementary sequence is appended to the 3′-end of the complementary sequence to generate a self complementary DFO molecule comprising sequence complementary to the nucleic acid target. (iv) The DFO molecule can self-assemble to form a double stranded oligonucleotide. FIG. 14B shows a non-limiting representative example of a duplex forming oligonucleotide sequence. FIG. 14C shows a non-limiting example of the self assembly schematic of a representative duplex forming oligonucleotide sequence. FIG. 14D shows a non-limiting example of the self assembly schematic of a representative duplex forming oligonucleotide sequence followed by interaction with a target nucleic acid sequence resulting in modulation of gene expression.

[0267] FIG. 15 shows a non-limiting example of the design of self complementary DFO constructs utilizing palidrome and/or repeat nucleic acid sequences that are incorporated into the DFO constructs that have sequence complementary to any target nucleic acid sequence of interest. Incorporation of these palindrome/repeat sequences allow the design of DFO constructs that form duplexes in which each strand is capable of mediating modulation of target gene expression, for example by RNAi. First, the target sequence is identified. A complementary sequence is then generated in which nucleotide or non-nucleotide modifications (shown as X or Y) are introduced into the complementary sequence that generate an artificial palindrome (shown as XYXYXY in the Figure). An inverse repeat of the non-palindrome/repeat complementary sequence is appended to the 3′-end of the complementary sequence to generate a self complementary DFO comprising sequence complementary to the nucleic acid target. The DFO can self-assemble to form a double stranded oligonucleotide.

[0268] FIG. 16 shows non-limiting examples of multifunctional siNA molecules of the invention comprising two separate polynucleotide sequences that are each capable of mediating RNAi directed cleavage of differing target nucleic acid sequences. FIG. 16A shows a non-limiting example of a multifunctional siNA molecule having a first region that is complementary to a first target nucleic acid sequence (complementary region 1) and a second region that is complementary to a second target nucleic acid sequence (complementary region 2), wherein the first and second complementary regions are situated at the 3′-ends of each polynucleotide sequence in the multifunctional siNA. The dashed portions of each polynucleotide sequence of the multifunctional siNA construct have complementarity with regard to corresponding portions of the siNA duplex, but do not have complementarity to the target nucleic acid sequences. FIG. 16B shows a non-limiting example of a multifunctional siNA molecule having a first region that is complementary to a first target nucleic acid sequence (complementary region 1) and a second region that is complementary to a second target nucleic acid sequence (complementary region 2), wherein the first and second complementary regions are situated at the 5′-ends of each polynucleotide sequence in the multifunctional siNA. The dashed portions of each polynucleotide sequence of the multifunctional siNA construct have complementarity with regard to corresponding portions of the siNA duplex, but do not have complementarity to the target nucleic acid sequences.

[0269] FIG. 17 shows non-limiting examples of multifunctional siNA molecules of the invention comprising a single polynucleotide sequence comprising distinct regions that are each capable of mediating RNAi directed cleavage of differing target nucleic acid sequences. FIG. 17A shows a non-limiting example of a multifunctional siNA molecule having a first region that is complementary to a first target nucleic acid sequence (complementary region 1) and a second region that is complementary to a second target nucleic acid sequence (complementary region 2), wherein the second complementary region is situated at the 3′-end of the polynucleotide sequence in the multifunctional siNA. The dashed portions of each polynucleotide sequence of the multifunctional siNA construct have complementarity with regard to corresponding portions of the siNA duplex, but do not have complementarity to the target nucleic acid sequences. FIG. 17B shows a non-limiting example of a multifunctional siNA molecule having a first region that is complementary to a first target nucleic acid sequence (complementary region 1) and a second region that is complementary to a second target nucleic acid sequence (complementary region 2), wherein the first complementary region is situated at the 5′-end of the polynucleotide sequence in the multifunctional siNA. The dashed portions of each polynucleotide sequence of the multifunctional siNA construct have complementarity with regard to corresponding portions of the siNA duplex, but do not have complementarity to the target nucleic acid sequences. In one embodiment, these multifunctional siNA constructs are processed in vivo or in vitro to generate multifunctional siNA constructs as shown in FIG. 16.

[0270] FIG. 18 shows non-limiting examples of multifunctional siNA molecules of the invention comprising two separate polynucleotide sequences that are each capable of mediating RNAi directed cleavage of differing target nucleic acid sequences and wherein the multifunctional siNA construct further comprises a self complementary, palindrome, or repeat region, thus enabling shorter bifuctional siNA constructs that can mediate RNA interference against differing target nucleic acid sequences. FIG. 18A shows a non-limiting example of a multifunctional siNA molecule having a first region that is complementary to a first target nucleic acid sequence (complementary region 1) and a second region that is complementary to a second target nucleic acid sequence (complementary region 2), wherein the first and second complementary regions are situated at the 3′-ends of each polynucleotide sequence in the multifunctional siNA, and wherein the first and second complementary regions further comprise a self complementary, palindrome, or repeat region. The dashed portions of each polynucleotide sequence of the multifunctional siNA construct have complementarity with regard to corresponding portions of the siNA duplex, but do not have complementarity to the target nucleic acid sequences. FIG. 18B shows a non-limiting example of a multifunctional siNA molecule having a first region that is complementary to a first target nucleic acid sequence (complementary region 1) and a second region that is complementary to a second target nucleic acid sequence (complementary region 2), wherein the first and second complementary regions are situated at the 5′-ends of each polynucleotide sequence in the multifunctional siNA, and wherein the first and second complementary regions further comprise a self complementary, palindrome, or repeat region. The dashed portions of each polynucleotide sequence of the multifunctional siNA construct have complementarity with regard to corresponding portions of the siNA duplex, but do not have complementarity to the target nucleic acid sequences.

[0271] FIG. 19 shows non-limiting examples of multifunctional siNA molecules of the invention comprising a single polynucleotide sequence comprising distinct regions that are each capable of mediating RNAi directed cleavage of differing target nucleic acid sequences and wherein the multifunctional siNA construct further comprises a self complementary, palindrome, or repeat region, thus enabling shorter bifuctional siNA constructs that can mediate RNA interference against differing target nucleic acid sequences. FIG. 19A shows a non-limiting example of a multifunctional siNA molecule having a first region that is complementary to a first target nucleic acid sequence (complementary region 1) and a second region that is complementary to a second target nucleic acid sequence (complementary region 2), wherein the second complementary region is situated at the 3′-end of the polynucleotide sequence in the multifunctional siNA, and wherein the first and second complementary regions further comprise a self complementary, palindrome, or repeat region. The dashed portions of each polynucleotide sequence of the multifunctional siNA construct have complementarity with regard to corresponding portions of the siNA duplex, but do not have complementarity to the target nucleic acid sequences. FIG. 19B shows a non-limiting example of a multifunctional siNA molecule having a first region that is complementary to a first target nucleic acid sequence (complementary region 1) and a second region that is complementary to a second target nucleic acid sequence (complementary region 2), wherein the first complementary region is situated at the 5′-end of the polynucleotide sequence in the multifunctional siNA, and wherein the first and second complementary regions further comprise a self complementary, palindrome, or repeat region. The dashed portions of each polynucleotide sequence of the multifunctional siNA construct have complementarity with regard to corresponding portions of the siNA duplex, but do not have complementarity to the target nucleic acid sequences. In one embodiment, these multifunctional siNA constructs are processed in vivo or in vitro to generate multifunctional siNA constructs as shown in FIG. 18.

[0272] FIG. 20 shows a non-limiting example of how multifunctional siNA molecules of the invention can target two separate target nucleic acid molecules, such as separate RNA molecules encoding differing proteins, for example, a cytokine and its corresponding receptor, differing viral strains, a virus and a cellular protein involved in viral infection or replication, or differing proteins involved in a common or divergent biologic pathway that is implicated in the maintenance of progression of disease. Each strand of the multifunctional siNA construct comprises a region having complementarity to separate target nucleic acid molecules. The multifunctional siNA molecule is designed such that each strand of the siNA can be utilized by the RISC complex to initiate RNA interference mediated cleavage of its corresponding target. These design parameters can include destabilization of each end of the siNA construct (see for example Schwarz et al., 2003, Cell, 115, 199-208). Such destabilization can be accomplished for example by using guanosine-cytidine base pairs, alternate base pairs (e.g., wobbles), or destabilizing chemically modified nucleotides at terminal nucleotide positions as is known in the art.

[0273] FIG. 21 shows a non-limiting example of how multifunctional siNA molecules of the invention can target two separate target nucleic acid sequences within the same target nucleic acid molecule, such as alternate coding regions of a RNA, coding and non-coding regions of a RNA, or alternate splice variant regions of a RNA. Each strand of the multifunctional siNA construct comprises a region having complementarity to the separate regions of the target nucleic acid molecule. The multifunctional siNA molecule is designed such that each strand of the siNA can be utilized by the RISC complex to initiate RNA interference mediated cleavage of its corresponding target region. These design parameters can include destabilization of each end of the siNA construct (see for example Schwarz et al., 2003, Cell, 115, 199-208). Such destabilization can be accomplished for example by using guanosine-cytidine base pairs, alternate base pairs (e.g., wobbles), or destabilizing chemically modified nucleotides at terminal nucleotide positions as is known in the art.

[0274] FIG. 22 shows a non-limiting example of reduction of BACE mRNA levels in A549 cells after treatment with siNA molecules targeting BACE mRNA. A549 cells were transfected with 0.25 ug/well of lipid complexed with 25 nM siNA. A screen of siNA constructs comprising ribonucleotides and 3′-terminal dithymidine caps was compared to untreated cells, scrambled siNA control constructs (Scram 1 and Scram 2), and the cells transfected with lipid alone (transfection control). As shown in the Figure, all of the siNA constructs show significant reduction of BACE RNA expression.

[0275] FIG. 23 shows a non-limiting example of reduction of BACE mRNA levels in A549 cells (5,000 cells/well) 24 hours after treatment with siNA molecules targeting BACE mRNA. A549 cells were transfected with 0.25 ug/well of lipid complexed with 25 nM siNA. A lead siNA construct (31007/31083) chosen from the screen described in FIG. 22 was further modified using chemical modifications described in Table IV herein. Chemically modified constructs having Stab 4/5 chemistry (31378/31381) and Stab 7/11 chemistry (31384/31387) (solid bars; see Tables III and IV) were tested for efficacy compared to matched chemistry inverted controls (open bars; sequences shown in Table III). The original lead siNA construct (31007/31083) and the Stab 4/5 and Stab 7/11 constructs were compared to untreated cells, scrambled siNA control constructs (Scram1 and Scram2), and cells transfected with lipid alone (transfection control). As shown in the figure, the original lead construct and the Stab 4/5 and Stab 7/11 modified siNA constructs all show significant reduction of BACE RNA expression.

[0276] FIG. 24 shows a non-limiting example of reduction of APP mRNA in SK-N-SH cells mediated by chemically modified siNAs that target APP mRNA. SK-N-SH cells were transfected with 0.25 ug/well of lipid complexed with 25 nM siNA. Active siNA constructs comprising various stabilization chemistries (solid bars; see Tables III and IV) were compared to untreated cells, matched chemistry irrelevant siNA control constructs (IC1), and cells transfected with lipid alone (transfection control). As shown in the figure, the siNA constructs significantly reduce APP RNA expression.

[0277] FIG. 25 shows a non-limiting example of reduction of PSEN1 mRNA in SK-N-SH cells mediated by chemically modified siNAs that target PSEN1 mRNA. SK-N-SH cells were transfected with 0.25 ug/well of lipid complexed with 25 nM siNA. Active siNA constructs comprising various stabilization chemistries (solid bars; see Tables III and IV) were compared to untreated cells, matched chemistry irrelevant siNA control constructs (IC1), and cells transfected with lipid alone (transfection control). As shown in the figure, the siNA constructs significantly reduce PSEN1 RNA expression.

[0278] FIG. 26 shows a non-limiting example of reduction of PSEN2 mRNA in SK-N-SH cells mediated by chemically modified siNAs that target PSEN2 mRNA. SK-N-SH cells were transfected with 0.25 ug/well of lipid complexed with 25 nM siNA. Active siNA constructs comprising various stabilization chemistries (solid bars; see Tables III and IV) were compared to untreated cells, matched chemistry irrelevant siNA control constructs (IC1), and cells transfected with lipid alone (transfection control). As shown in the figure, the siNA constructs significantly reduce PSEN2 RNA expression.

### DETAILED DESCRIPTION OF THE INVENTION

Mechanism of Action of Nucleic Acid Molecules of the Invention

[0279] The discussion that follows discusses the proposed mechanism of RNA interference mediated by short interfering RNA as is presently known, and is not meant to be limiting and is not an admission of prior art. Applicant demonstrates herein that chemically-modified short interfering nucleic acids possess similar or improved capacity to mediate RNAi as do siRNA molecules and are expected to possess improved stability and activity in vivo; therefore, this discussion is not meant to be limiting only to siRNA and can be applied to siNA as a whole. By “improved capacity to mediate RNAi” or “improved RNAi activity” is meant to include RNAi activity measured in vitro and/or in vivo where the RNAi activity is a reflection of both the ability of the siNA to mediate RNAi and the stability of the siNAs of the invention. In this invention, the product of these activities can be increased in vitro and/or in vivo compared to an all RNA siRNA or a siNA containing a plurality of ribonucleotides. In some cases, the activity or stability of the siNA molecule can be decreased (i.e., less than ten-fold), but the overall activity of the siNA molecule is enhanced in vitro and/or in vivo.

[0280] RNA interference refers to the process of sequence specific post-transcriptional gene silencing in animals mediated by short interfering RNAs (siRNAs) (Fire et al., 1998, Nature, 391, 806). The corresponding process in plants is commonly referred to as post-transcriptional gene silencing or RNA silencing and is also referred to as quelling in fungi. The process of post-transcriptional gene silencing is thought to be an evolutionarily-conserved cellular defense mechanism used to prevent the expression of foreign genes which is commonly shared by diverse flora and phyla (Fire et al., 1999, Trends Genet., 15, 358). Such protection from foreign gene expression may have evolved in response to the production of double-stranded RNAs (dsRNAs) derived from viral infection or the random integration of transposon elements into a host genome via a cellular response that specifically destroys homologous single-stranded RNA or viral genomic RNA. The presence of dsRNA in cells triggers the RNAi response though a mechanism that has yet to be fully characterized. This mechanism appears to be different from the interferon response that results from dsRNA-mediated activation of protein kinase PKR and 2′,5′-oligoadenylate synthetase resulting in non-specific cleavage of mRNA by ribonuclease L.

[0281] The presence of long dsRNAs in cells stimulates the activity of a ribonuclease III enzyme referred to as Dicer. Dicer is involved in the processing of the dsRNA into short pieces of dsRNA known as short interfering RNAs (siRNAs) (Berstein et al., 2001, Nature, 409, 363). Short interfering RNAs derived from Dicer activity are typically about 21 to about 23 nucleotides in length and comprise about 19 base pair duplexes. Dicer has also been implicated in the excision of 21- and 22-nucleotide small temporal RNAs (stRNAs) from precursor RNA of conserved structure that are implicated in translational control (Hutvagner et al., 2001, Science, 293, 834). The RNAi response also features an endonuclease complex containing a siRNA, commonly referred to as an RNA-induced silencing complex (RISC), which mediates cleavage of single-stranded RNA having sequence homologous to the siRNA. Cleavage of the target RNA takes place in the middle of the region complementary to the guide sequence of the siRNA duplex (Elbashir et al., 2001, Genes Dev., 15, 188). In addition, RNA interference can also involve small RNA (e.g., micro-RNA or miRNA) mediated gene silencing, presumably though cellular mechanisms that regulate chromatin structure and thereby prevent transcription of target gene sequences (see for example Allshire, 2002, Science, 297, 1818-1819; Volpe et al., 2002, Science, 297, 1833-1837; Jenuwein, 2002, Science, 297, 2215-2218; and Hall et al., 2002, Science, 297, 2232-2237). As such, siNA molecules of the invention can be used to mediate gene silencing via interaction with RNA transcripts or alternately by interaction with particular gene sequences, wherein such interaction results in gene silencing either at the transcriptional level or post-transcriptional level.

[0282] RNAi has been studied in a variety of systems. Fire et al., 1998, Nature, 391, 806, were the first to observe RNAi in C. elegans. Wianny and Goetz, 1999, Nature Cell Biol., 2, 70, describe RNAi mediated by dsRNA in mouse embryos. Hammond et al., 2000, Nature, 404, 293, describe RNAi in Drosophila cells transfected with dsRNA. Elbashir et al., 2001, Nature, 411, 494, describe RNAi induced by introduction of duplexes of synthetic 21-nucleotide RNAs in cultured mammalian cells including human embryonic kidney and HeLa cells. Recent work in Drosophila embryonic lysates has revealed certain requirements for siRNA length, structure, chemical composition, and sequence that are essential to mediate efficient RNAi activity. These studies have shown that 21 nucleotide siRNA duplexes are most active when containing two 2-nucleotide 3′-terminal nucleotide overhangs. Furthermore, substitution of one or both siRNA strands with 2′-deoxy or 2′-O-methyl nucleotides abolishes RNAi activity, whereas substitution of 3′-terminal siRNA nucleotides with deoxy nucleotides was shown to be tolerated. Mismatch sequences in the center of the siRNA duplex were also shown to abolish RNAi activity. In addition, these studies also indicate that the position of the cleavage site in the target RNA is defined by the 5′-end of the siRNA guide sequence rather than the 3′end (Elbashir et al., 2001, EMBO J., 20, 6877). Other studies have indicated that a 5′-phosphate on the target-complementary strand of a siRNA duplex is required for siRNA activity and that ATP is utilized to maintain the 5′-phosphate moiety on the siRNA (Nykanen et al., 2001, Cell, 107, 309); however, siRNA molecules lacking a 5′-phosphate are active when introduced exogenously, suggesting that 5′-phosphorylation of siRNA constructs may occur in vivo.

Synthesis of Nucleic Acid Molecules

[0283] Synthesis of nucleic acids greater than 100 nucleotides in length is difficult using automated methods, and the therapeutic cost of such molecules is prohibitive. In this invention, small nucleic acid motifs (“small” refers to nucleic acid motifs no more than 100 nucleotides in length, preferably no more than 80 nucleotides in length, and most preferably no more than 50 nucleotides in length; e.g., individual siNA oligonucleotide sequences or siNA sequences synthesized in tandem) are preferably used for exogenous delivery. The simple structure of these molecules increases the ability of the nucleic acid to invade targeted regions of protein and/or RNA structure. Exemplary molecules of the instant invention are chemically synthesized, and others can similarly be synthesized.

[0284] Oligonucleotides (e.g., certain modified oligonucleotides or portions of oligonucleotides lacking ribonucleotides) are synthesized using protocols known in the art, for example as described in Caruthers et al., 1992, Methods in Enzymology 211, 3-19, Thompson et al., International PCT Publication No. WO 99/54459, Wincott et al., 1995, Nucleic Acids Res. 23, 2677-2684, Wincott et al., 1997, Methods Mol. Bio., 74, 59, Brennan et al., 1998, Biotechnol Bioeng., 61, 33-45, and Brennan, U.S. Pat. No. 6,001,311. All of these references are incorporated herein by reference. The synthesis of oligonucleotides makes use of common nucleic acid protecting and coupling groups, such as dimethoxytrityl at the 5′-end, and phosphoramidites at the 3′-end. In a non-limiting example, small scale syntheses are conducted on a 394 Applied Biosystems, Inc. synthesizer using a 0.2 μmol scale protocol with a 2.5 min coupling step for 2′-O-methylated nucleotides and a 45 second coupling step for 2′-deoxy nucleotides or 2′-deoxy-2′-fluoro nucleotides. Table V outlines the amounts and the contact times of the reagents used in the synthesis cycle. Alternatively, syntheses at the 0.2 μmol scale can be performed on a 96-well plate synthesizer, such as the instrument produced by Protogene (Palo Alto, Calif.) with minimal modification to the cycle. A 33-fold excess (60 μL of 0.11 M=6.6 μmol) of 2′-O-methyl phosphoramidite and a 105-fold excess of S-ethyl tetrazole (60 μL of 0.25 M=15 μmol) can be used in each coupling cycle of 2′-O-methyl residues relative to polymer-bound 5′-hydroxyl. A 22-fold excess (40 μL of 0.11 M=4.4 μmol) of deoxy phosphoramidite and a 70-fold excess of S-ethyl tetrazole (40 μL of 0.25 M=10 μmol) can be used in each coupling cycle of deoxy residues relative to polymer-bound 5′-hydroxyl. Average coupling yields on the 394 Applied Biosystems, Inc. synthesizer, determined by calorimetric quantitation of the trityl fractions, are typically 97.5-99%. Other oligonucleotide synthesis reagents for the 394 Applied Biosystems, Inc. synthesizer include the following: detritylation solution is 3% TCA in methylene chloride (ABI); capping is performed with 16% N-methyl imidazole in THF (ABI) and 10% acetic anhydride/10% 2,6-lutidine in THF (ABI); and oxidation solution is 16.9 mM I₂, 49 mM pyridine, 9% water in THF (PerSeptive Biosystems, Inc.). Burdick & Jackson Synthesis Grade acetonitrile is used directly from the reagent bottle. S-Ethyltetrazole solution (0.25 M in acetonitrile) is made up from the solid obtained from American International Chemical, Inc. Alternately, for the introduction of phosphorothioate linkages, Beaucage reagent (3H-1,2-Benzodithiol-3-one 1,1-dioxide, 0.05 M in acetonitrile) is used.

[0285] Deprotection of the DNA-based oligonucleotides is performed as follows: the polymer-bound trityl-on oligoribonucleotide is transferred to a 4 mL glass screw top vial and suspended in a solution of 40% aqueous methylamine (1 mL) at 65° C. for 10 minutes. After cooling to −20° C., the supernatant is removed from the polymer support. The support is washed three times with 1.0 mL of EtOH:MeCN:H₂O/3:1:1, vortexed and the supernatant is then added to the first supernatant. The combined supernatants, containing the oligoribonucleotide, are dried to a white powder.

[0286] The method of synthesis used for RNA including certain siNA molecules of the invention follows the procedure as described in Usman et al., 1987, J. Am. Chem. Soc., 109, 7845; Scaringe et al., 1990, Nucleic Acids Res., 18, 5433; and Wincott et al., 1995, Nucleic Acids Res. 23, 2677-2684 Wincott et al., 1997, Methods Mol. Bio., 74, 59, and makes use of common nucleic acid protecting and coupling groups, such as dimethoxytrityl at the 5′-end, and phosphoramidites at the 3′-end. In a non-limiting example, small scale syntheses are conducted on a 394 Applied Biosystems, Inc. synthesizer using a 0.2 μmol scale protocol with a 7.5 min coupling step for alkylsilyl protected nucleotides and a 2.5 min coupling step for 2′-O-methylated nucleotides. Table V outlines the amounts and the contact times of the reagents used in the synthesis cycle. Alternatively, syntheses at the 0.2 μmol scale can be done on a 96-well plate synthesizer, such as the instrument produced by Protogene (Palo Alto, Calif.) with minimal modification to the cycle. A 33-fold excess (60 μL of 0.11 M=6.6 μmol) of 2′-O-methyl phosphoramidite and a 75-fold excess of S-ethyl tetrazole (60 μL of 0.25 M=15 μmol) can be used in each coupling cycle of 2′-O-methyl residues relative to polymer-bound 5′-hydroxyl. A 66-fold excess (120 μL of 0.11 M=13.2 μmol) of alkylsilyl (ribo) protected phosphoramidite and a 150-fold excess of S-ethyl tetrazole (120 μL of 0.25 M=30 μmol) can be used in each coupling cycle of ribo residues relative to polymer-bound 5′-hydroxyl. Average coupling yields on the 394 Applied Biosystems, Inc. synthesizer, determined by colorimetric quantitation of the trityl fractions, are typically 97.5-99%. Other oligonucleotide synthesis reagents for the 394 Applied Biosystems, Inc. synthesizer include the following: detritylation solution is 3% TCA in methylene chloride (ABI); capping is performed with 16% N-methyl imidazole in THF (ABI) and 10% acetic anhydride/10% 2,6-lutidine in THF (ABI); oxidation solution is 16.9 mM I₂, 49 mM pyridine, 9% water in THF (PerSeptive Biosystems, Inc.). Burdick & Jackson Synthesis Grade acetonitrile is used directly from the reagent bottle. S-Ethyltetrazole solution (0.25 M in acetonitrile) is made up from the solid obtained from American International Chemical, Inc. Alternately, for the introduction of phosphorothioate linkages, Beaucage reagent (3H-1,2-Benzodithiol-3-one 1,1-dioxide0.05 M in acetonitrile) is used.

[0287] Deprotection of the RNA is performed using either a two-pot or one-pot protocol. For the two-pot protocol, the polymer-bound trityl-on oligoribonucleotide is transferred to a 4 mL glass screw top vial and suspended in a solution of 40% aq. methylamine (1 mL) at 65° C. for 10 min. After cooling to −20° C., the supernatant is removed from the polymer support. The support is washed three times with 1.0 mL of EtOH:MeCN:H₂O/3:1:1, vortexed and the supernatant is then added to the first supernatant. The combined supernatants, containing the oligoribonucleotide, are dried to a white powder. The base deprotected oligoribonucleotide is resuspended in anhydrous TEA/HF/NMP solution (300 μL of a solution of 1.5 mL N-methylpyrrolidinone, 750 μL TEA and 1 mL TEA·3HF to provide a 1.4 M HF concentration) and heated to 65° C. After 1.5 h, the oligomer is quenched with 1.5 M NH₄HCO₃.

[0288] Alternatively, for the one-pot protocol, the polymer-bound trityl-on oligoribonucleotide is transferred to a 4 mL glass screw top vial and suspended in a solution of 33% ethanolic methylamine/DMSO: 1/1 (0.8 mL) at 65° C. for 15 minutes. The vial is brought to room temperature TEA·3HF (0.1 mL) is added and the vial is heated at 65° C. for 15 minutes. The sample is cooled at −20° C. and then quenched with 1.5 M NH₄HCO₃.

[0289] For purification of the trityl-on oligomers, the quenched NH₄HCO₃ solution is loaded onto a C-18 containing cartridge that had been prewashed with acetonitrile followed by 50 mM TEAA. After washing the loaded cartridge with water, the RNA is detritylated with 0.5% TFA for 13 minutes. The cartridge is then washed again with water, salt exchanged with 1 M NaCl and washed with water again. The oligonucleotide is then eluted with 30% acetonitrile.

[0290] The average stepwise coupling yields are typically >98% (Wincott et al., 1995 Nucleic Acids Res. 23, 2677-2684). Those of ordinary skill in the art will recognize that the scale of synthesis can be adapted to be larger or smaller than the example described above including but not limited to 96-well format.

[0291] Alternatively, the nucleic acid molecules of the present invention can be synthesized separately and joined together post-synthetically, for example, by ligation (Moore et al., 1992, Science 256, 9923; Draper et al., International PCT publication No. WO 93/23569; Shabarova et al., 1991, Nucleic Acids Research 19, 4247; Bellon et al., 1997, Nucleosides & Nucleotides, 16, 951; Bellon et al., 1997, Bioconjugate Chem. 8, 204), or by hybridization following synthesis and/or deprotection.

[0292] The siNA molecules of the invention can also be synthesized via a tandem synthesis methodology as described in Example 1 herein, wherein both siNA strands are synthesized as a single contiguous oligonucleotide fragment or strand separated by a cleavable linker which is subsequently cleaved to provide separate siNA fragments or strands that hybridize and permit purification of the siNA duplex. The linker can be a polynucleotide linker or a non-nucleotide linker. The tandem synthesis of siNA as described herein can be readily adapted to both multiwell/multiplate synthesis platforms such as 96 well or similarly larger multi-well platforms. The tandem synthesis of siNA as described herein can also be readily adapted to large scale synthesis platforms employing batch reactors, synthesis columns and the like.

[0293] A siNA molecule can also be assembled from two distinct nucleic acid strands or fragments wherein one fragment includes the sense region and the second fragment includes the antisense region of the RNA molecule.

[0294] The nucleic acid molecules of the present invention can be modified extensively to enhance stability by modification with nuclease resistant groups, for example, 2′-amino, 2′-C-allyl, 2′-fluoro, 2′-O-methyl, 2′-H (for a review see Usman and Cedergren, 1992, TIBS 17, 34; Usman et al., 1994, Nucleic Acids Symp. Ser. 31, 163). siNA constructs can be purified by gel electrophoresis using general methods or can be purified by high pressure liquid chromatography (HPLC; see Wincott et al., supra, the totality of which is hereby incorporated herein by reference) and re-suspended in water.

[0295] In another aspect of the invention, siNA molecules of the invention are expressed from transcription units inserted into DNA or RNA vectors. The recombinant vectors can be DNA plasmids or viral vectors. siNA expressing viral vectors can be constructed based on, but not limited to, adeno-associated virus, retrovirus, adenovirus, or alphavirus. The recombinant vectors capable of expressing the siNA molecules can be delivered as described herein, and persist in target cells. Alternatively, viral vectors can be used that provide for transient expression of siNA molecules.

Optimizing Activity of the Nucleic Acid Molecule of the Invention.

[0296] Chemically synthesizing nucleic acid molecules with modifications (base, sugar and/or phosphate) can prevent their degradation by serum ribonucleases, which can increase their potency (see e.g., Eckstein et al., International Publication No. WO 92/07065; Perrault et al., 1990 Nature 344, 565; Pieken et al., 1991, Science 253, 314; Usman and Cedergren, 1992, Trends in Biochem. Sci. 17, 334; Usman et al., International Publication No. WO 93/15187; and Rossi et al., International Publication No. WO 91/03162; Sproat, U.S. Pat. No. 5,334,711; Gold et al., U.S. Pat. No. 6,300,074; and Burgin et al., supra; all of which are incorporated by reference herein). All of the above references describe various chemical modifications that can be made to the base, phosphate and/or sugar moieties of the nucleic acid molecules described herein. Modifications that enhance their efficacy in cells, and removal of bases from nucleic acid molecules to shorten oligonucleotide synthesis times and reduce chemical requirements are desired.

[0297] There are several examples in the art describing sugar, base and phosphate modifications that can be introduced into nucleic acid molecules with significant enhancement in their nuclease stability and efficacy. For example, oligonucleotides are modified to enhance stability and/or enhance biological activity by modification with nuclease resistant groups, for example, 2′-amino, 2′-C-allyl, 2′-fluoro, 2′-O-methyl, 2′-O-allyl, 2′-H, nucleotide base modifications (for a review see Usman and Cedergren, 1992, TIBS. 17, 34; Usman et al., 1994, Nucleic Acids Symp. Ser. 31, 163; Burgin et al., 1996, Biochemistry, 35, 14090). Sugar modification of nucleic acid molecules have been extensively described in the art (see Eckstein et al., International Publication PCT No. WO 92/07065; Perrault et al. Nature, 1990, 344, 565-568; Pieken et al. Science, 1991, 253, 314-317; Usman and Cedergren, Trends in Biochem. Sci., 1992, 17, 334-339; Usman et al. International Publication PCT No. WO 93/15187; Sproat, U.S. Pat. No. 5,334,711 and Beigelman et al., 1995, J. Biol. Chem., 270, 25702; Beigelman et al., International PCT publication No. WO 97/26270; Beigelman et al., U.S. Pat. No. 5,716,824; Usman et al., U.S. Pat. No. 5,627,053; Woolf et al., International PCT Publication No. WO 98/13526; Thompson et al., U.S. Ser. No. 60/082,404 which was filed on Apr. 20, 1998; Karpeisky et al., 1998, Tetrahedron Lett., 39, 1131; Eamshaw and Gait, 1998, Biopolymers (Nucleic Acid Sciences), 48, 39-55; Verma and Eckstein, 1998, Annu. Rev. Biochem., 67, 99-134; and Burlina et al., 1997, Bioorg. Med Chem., 5, 1999-2010; all of the references are hereby incorporated in their totality by reference herein). Such publications describe general methods and strategies to determine the location of incorporation of sugar, base and/or phosphate modifications and the like into nucleic acid molecules without modulating catalysis, and are incorporated by reference herein. In view of such teachings, similar modifications can be used as described herein to modify the siNA nucleic acid molecules of the instant invention so long as the ability of siNA to promote RNAi is cells is not significantly inhibited.

[0298] While chemical modification of oligonucleotide internucleotide linkages with phosphorothioate, phosphorodithioate, and/or 5′-methylphosphonate linkages improves stability, excessive modifications can cause some toxicity or decreased activity. Therefore, when designing nucleic acid molecules, the amount of these internucleotide linkages should be minimized. The reduction in the concentration of these linkages should lower toxicity, resulting in increased efficacy and higher specificity of these molecules.

[0299] Short interfering nucleic acid (siNA) molecules having chemical modifications that maintain or enhance activity are provided. Such a nucleic acid is also generally more resistant to nucleases than an unmodified nucleic acid. Accordingly, the in vitro and/or in vivo activity should not be significantly lowered. In cases in which modulation is the goal, therapeutic nucleic acid molecules delivered exogenously should optimally be stable within cells until translation of the target RNA has been modulated long enough to reduce the levels of the undesirable protein. This period of time varies between hours to days depending upon the disease state. Improvements in the chemical synthesis of RNA and DNA (Wincott et al., 1995, Nucleic Acids Res. 23, 2677; Caruthers et al., 1992, Methods in Enzymology 211, 3-19 (incorporated by reference herein)) have expanded the ability to modify nucleic acid molecules by introducing nucleotide modifications to enhance their nuclease stability, as described above.

[0300] In one embodiment, nucleic acid molecules of the invention include one or more (e.g., about 1, 2, 3, 4, 5, 6, 7, 8, 9, 10, or more) G-clamp nucleotides. A G-clamp nucleotide is a modified cytosine analog wherein the modifications confer the ability to hydrogen bond both Watson-Crick and Hoogsteen faces of a complementary guanine within a duplex, see for example Lin and Matteucci, 1998, J. Am. Chem. Soc., 120, 8531-8532. A single G-clamp analog substitution within an oligonucleotide can result in substantially enhanced helical thermal stability and mismatch discrimination when hybridized to complementary oligonucleotides. The inclusion of such nucleotides in nucleic acid molecules of the invention results in both enhanced affinity and specificity to nucleic acid targets, complementary sequences, or template strands. In another embodiment, nucleic acid molecules of the invention include one or more (e.g., about 1, 2, 3, 4, 5, 6, 7, 8, 9, 10, or more) LNA “locked nucleic acid” nucleotides such as a 2′,4′-C methylene bicyclo nucleotide (see for example Wengel et al., International PCT Publication No. WO 00/66604 and WO 99/14226).

[0301] In another embodiment, the invention features conjugates and/or complexes of siNA molecules of the invention. Such conjugates and/or complexes can be used to facilitate delivery of siNA molecules into a biological system, such as a cell. The conjugates and complexes provided by the instant invention can impart therapeutic activity by transferring therapeutic compounds across cellular membranes, altering the pharmacokinetics, and/or modulating the localization of nucleic acid molecules of the invention. The present invention encompasses the design and synthesis of novel conjugates and complexes for the delivery of molecules, including, but not limited to, small molecules, lipids, cholesterol, phospholipids, nucleosides, nucleotides, nucleic acids, antibodies, toxins, negatively charged polymers and other polymers, for example proteins, peptides, hormones, carbohydrates, polyethylene glycols, or polyamines, across cellular membranes. In general, the transporters described are designed to be used either individually or as part of a multi-component system, with or without degradable linkers. These compounds are expected to improve delivery and/or localization of nucleic acid molecules of the invention into a number of cell types originating from different tissues, in the presence or absence of serum (see Sullenger and Cech, U.S. Pat. No. 5,854,038). Conjugates of the molecules described herein can be attached to biologically active molecules via linkers that are biodegradable, such as biodegradable nucleic acid linker molecules.

[0302] The term “biodegradable linker” as used herein, refers to a nucleic acid or non-nucleic acid linker molecule that is designed as a biodegradable linker to connect one molecule to another molecule, for example, a biologically active molecule to a siNA molecule of the invention or the sense and antisense strands of a siNA molecule of the invention. The biodegradable linker is designed such that its stability can be modulated for a particular purpose, such as delivery to a particular tissue or cell type. The stability of a nucleic acid-based biodegradable linker molecule can be modulated by using various chemistries, for example combinations of ribonucleotides, deoxyribonucleotides, and chemically-modified nucleotides, such as 2′-O-methyl, 2′-fluoro, 2′-amino, 2′-O-amino, 2′-C-allyl, 2′-O-allyl, and other 2′-modified or base modified nucleotides. The biodegradable nucleic acid linker molecule can be a dimer, trimer, tetramer or longer nucleic acid molecule, for example, an oligonucleotide of about 2, 3, 4, 5, 6, 7, 8, 9, 10, 11, 12, 13, 14, 15, 16, 17, 18, 19, or 20 nucleotides in length, or can comprise a single nucleotide with a phosphorus-based linkage, for example, a phosphoramidate or phosphodiester linkage. The biodegradable nucleic acid linker molecule can also comprise nucleic acid backbone, nucleic acid sugar, or nucleic acid base modifications.

[0303] The term “biodegradable” as used herein, refers to degradation in a biological system, for example, enzymatic degradation or chemical degradation.

[0304] The term “biologically active molecule” as used herein refers to compounds or molecules that are capable of eliciting or modifying a biological response in a system. Non-limiting examples of biologically active siNA molecules either alone or in combination with other molecules contemplated by the instant invention include therapeutically active molecules such as antibodies, cholesterol, hormones, antivirals, peptides, proteins, chemotherapeutics, small molecules, vitamins, co-factors, nucleosides, nucleotides, oligonucleotides, enzymatic nucleic acids, antisense nucleic acids, triplex forming oligonucleotides, 2,5-A chimeras, siNA, dsRNA, allozymes, aptamers, decoys and analogs thereof. Biologically active molecules of the invention also include molecules capable of modulating the pharmacokinetics and/or pharmacodynamics of other biologically active molecules, for example, lipids and polymers such as polyamines, polyamides, polyethylene glycol and other polyethers.

[0305] The term “phospholipid” as used herein, refers to a hydrophobic molecule comprising at least one phosphorus group. For example, a phospholipid can comprise a phosphorus-containing group and saturated or unsaturated alkyl group, optionally substituted with OH, COOH, oxo, amine, or substituted or unsubstituted aryl groups.

[0306] Therapeutic nucleic acid molecules (e.g., siNA molecules) delivered exogenously optimally are stable within cells until reverse transcription of the RNA has been modulated long enough to reduce the levels of the RNA transcript. The nucleic acid molecules are resistant to nucleases in order to function as effective intracellular therapeutic agents. Improvements in the chemical synthesis of nucleic acid molecules described in the instant invention and in the art have expanded the ability to modify nucleic acid molecules by introducing nucleotide modifications to enhance their nuclease stability as described above.

[0307] In yet another embodiment, siNA molecules having chemical modifications that maintain or enhance enzymatic activity of proteins involved in RNAi are provided. Such nucleic acids are also generally more resistant to nucleases than unmodified nucleic acids. Thus, in vitro and/or in vivo the activity should not be significantly lowered.

[0308] Use of the nucleic acid-based molecules of the invention will lead to better treatments by affording the possibility of combination therapies (e.g., multiple siNA molecules targeted to different genes; nucleic acid molecules coupled with known small molecule modulators; or intermittent treatment with combinations of molecules, including different motifs and/or other chemical or biological molecules). The treatment of subjects with siNA molecules can also include combinations of different types of nucleic acid molecules, such as enzymatic nucleic acid molecules (ribozymes), allozymes, antisense, 2,5-A oligoadenylate, decoys, and aptamers.

[0309] In another aspect a siNA molecule of the invention comprises one or more 5′ and/or a 3′-cap structure, for example, on only the sense siNA strand, the antisense siNA strand, or both siNA strands.

[0310] By “cap structure” is meant chemical modifications, which have been incorporated at either terminus of the oligonucleotide (see, for example, Adamic et al., U.S. Pat. No. 5,998,203, incorporated by reference herein). These terminal modifications protect the nucleic acid molecule from exonuclease degradation, and may help in delivery and/or localization within a cell. The cap may be present at the 5′-terminus (5′-cap) or at the 3′-terminal (3′-cap) or may be present on both termini. In non-limiting examples, the 5′-cap includes, but is not limited to, glyceryl, inverted deoxy abasic residue (moiety); 4′,5′-methylene nucleotide; 1-(beta-D-erythrofuranosyl) nucleotide, 4′-thio nucleotide; carbocyclic nucleotide; 1,5-anhydrohexitol nucleotide; L-nucleotides; alpha-nucleotides; modified base nucleotide; phosphorodithioate linkage; threo-pentofuranosyl nucleotide; acyclic 3′,4′-seco nucleotide; acyclic 3,4-dihydroxybutyl nucleotide; acyclic 3,5-dihydroxypentyl nucleotide, 3′-3′-inverted nucleotide moiety; 3′-3′-inverted abasic moiety; 3′-2′-inverted nucleotide moiety; 3′-2′-inverted abasic moiety; 1,4-butanediol phosphate; 3′-phosphoramidate; hexylphosphate; aminohexyl phosphate; 3′-phosphate; 3′-phosphorothioate; phosphorodithioate; or bridging or non-bridging methylphosphonate moiety.

[0311] Non-limiting examples of the 3′-cap include, but are not limited to, glyceryl, inverted deoxy abasic residue (moiety), 4′,5′-methylene nucleotide; 1-(beta-D-erythrofuranosyl) nucleotide; 4′-thio nucleotide, carbocyclic nucleotide; 5′-amino-alkyl phosphate; 1,3-diamino-2-propyl phosphate; 3-aminopropyl phosphate; 6-aminohexyl phosphate; 1,2-aminododecyl phosphate; hydroxypropyl phosphate; 1,5-anhydrohexitol nucleotide; L-nucleotide; alpha-nucleotide; modified base nucleotide; phosphorodithioate; threo-pentofuranosyl nucleotide; acyclic 3′,4′-seco nucleotide; 3,4-dihydroxybutyl nucleotide; 3,5-dihydroxypentyl nucleotide, 5′-5′-inverted nucleotide moiety; 5′-5′-inverted abasic moiety; 5′-phosphoramidate; 5′-phosphorothioate; 1,4-butanediol phosphate; 5′-amino; bridging and/or non-bridging 5′-phosphoramidate, phosphorothioate and/or phosphorodithioate, bridging or non bridging methylphosphonate and 5′-mercapto moieties (for more details see Beaucage and Iyer, 1993, Tetrahedron 49, 1925; incorporated by reference herein).

[0312] By the term “non-nucleotide” is meant any group or compound which can be incorporated into a nucleic acid chain in the place of one or more nucleotide units, including either sugar and/or phosphate substitutions, and allows the remaining bases to exhibit their enzymatic activity. The group or compound is abasic in that it does not contain a commonly recognized nucleotide base, such as adenosine, guanine, cytosine, uracil or thymine and therefore lacks a base at the 1′-position.

[0313] An “alkyl” group refers to a saturated aliphatic hydrocarbon, including straight-chain, branched-chain, and cyclic alkyl groups. Preferably, the alkyl group has 1 to 12 carbons. More preferably, it is a lower alkyl of from 1 to 7 carbons, more preferably 1 to 4 carbons. The alkyl group can be substituted or unsubstituted. When substituted the substituted group(s) is preferably, hydroxyl, cyano, alkoxy, ═O, ═S, NO₂ or N(CH₃)₂, amino, or SH. The term also includes alkenyl groups that are unsaturated hydrocarbon groups containing at least one carbon-carbon double bond, including straight-chain, branched-chain, and cyclic groups. Preferably, the alkenyl group has 1 to 12 carbons. More preferably, it is a lower alkenyl of from 1 to 7 carbons, more preferably 1 to 4 carbons. The alkenyl group may be substituted or unsubstituted. When substituted the substituted group(s) is preferably, hydroxyl, cyano, alkoxy, ═O, ═S, NO₂, halogen, N(CH₃)₂, amino, or SH. The term “alkyl” also includes alkynyl groups that have an unsaturated hydrocarbon group containing at least one carbon-carbon triple bond, including straight-chain, branched-chain, and cyclic groups. Preferably, the alkynyl group has 1 to 12 carbons. More preferably, it is a lower alkynyl of from 1 to 7 carbons, more preferably 1 to 4 carbons. The alkynyl group may be substituted or unsubstituted. When substituted the substituted group(s) is preferably, hydroxyl, cyano, alkoxy, ═O, ═S, NO₂ or N(CH₃)₂, amino or SH.

[0314] Such alkyl groups can also include aryl, alkylaryl, carbocyclic aryl, heterocyclic aryl, amide and ester groups. An “aryl” group refers to an aromatic group that has at least one ring having a conjugated pi electron system and includes carbocyclic aryl, heterocyclic aryl and biaryl groups, all of which may be optionally substituted. The preferred substituent(s) of aryl groups are halogen, trihalomethyl, hydroxyl, SH, OH, cyano, alkoxy, alkyl, alkenyl, alkynyl, and amino groups. An “alkylaryl” group refers to an alkyl group (as described above) covalently joined to an aryl group (as described above). Carbocyclic aryl groups are groups wherein the ring atoms on the aromatic ring are all carbon atoms. The carbon atoms are optionally substituted. Heterocyclic aryl groups are groups having from 1 to 3 heteroatoms as ring atoms in the aromatic ring and the remainder of the ring atoms are carbon atoms. Suitable heteroatoms include oxygen, sulfur, and nitrogen, and include furanyl, thienyl, pyridyl, pyrrolyl, N-lower alkyl pyrrolo, pyrimidyl, pyrazinyl, imidazolyl and the like, all optionally substituted. An “amide” refers to an —C(O)—NH—R, where R is either alkyl, aryl, alkylaryl or hydrogen. An “ester” refers to an —C(O)—OR′, where R is either alkyl, aryl, alkylaryl or hydrogen.

[0315] By “nucleotide” as used herein is as recognized in the art to include natural bases (standard), and modified bases well known in the art. Such bases are generally located at the 1′ position of a nucleotide sugar moiety. Nucleotides generally comprise a base, sugar and a phosphate group. The nucleotides can be unmodified or modified at the sugar, phosphate and/or base moiety, (also referred to interchangeably as nucleotide analogs, modified nucleotides, non-natural nucleotides, non-standard nucleotides and other; see, for example, Usman and McSwiggen, supra; Eckstein et al., International PCT Publication No. WO 92/07065; Usman et al., International PCT Publication No. WO 93/15187; Uhlman & Peyman, supra, all are hereby incorporated by reference herein). There are several examples of modified nucleic acid bases known in the art as summarized by Limbach et al., 1994, Nucleic Acids Res. 22, 2183. Some of the non-limiting examples of base modifications that can be introduced into nucleic acid molecules include, inosine, purine, pyridin-4-one, pyridin-2-one, phenyl, pseudouracil, 2,4,6-trimethoxy benzene, 3-methyl uracil, dihydrouridine, naphthyl, aminophenyl, 5-alkylcytidines (e.g., 5-methylcytidine), 5-alkyluridines (e.g., ribothymidine), 5-halouridine (e.g., 5-bromouridine) or 6-azapyrimidines or 6-alkylpyrimidines (e.g. 6-methyluridine), propyne, and others (Burgin et al., 1996, Biochemistry, 35, 14090; Uhlman & Peyman, supra). By “modified bases” in this aspect is meant nucleotide bases other than adenine, guanine, cytosine and uracil at 1′ position or their equivalents.

[0316] In one embodiment, the invention features modified siNA molecules, with phosphate backbone modifications comprising one or more phosphorothioate, phosphorodithioate, methylphosphonate, phosphotriester, morpholino, amidate carbamate, carboxymethyl, acetamidate, polyamide, sulfonate, sulfonamide, sulfamate, formacetal, thioformacetal, and/or alkylsilyl, substitutions. For a review of oligonucleotide backbone modifications, see Hunziker and Leumann, 1995, Nucleic Acid Analogues: Synthesis and Properties, in Modern Synthetic Methods, VCH, 331-417, and Mesmaeker et al., 1994, Novel Backbone Replacements for Oligonucleotides, in Carbohydrate Modifications in Antisense Research, ACS, 24-39.

[0317] By “abasic” is meant sugar moieties lacking a base or having other chemical groups in place of a base at the 1′ position, see for example Adamic et al., U.S. Pat. No. 5,998,203.

[0318] By “unmodified nucleoside” is meant one of the bases adenine, cytosine, guanine, thymine, or uracil joined to the 1′ carbon of β-D-ribo-furanose.

[0319] By “modified nucleoside” is meant any nucleotide base which contains a modification in the chemical structure of an unmodified nucleotide base, sugar and/or phosphate. Non-limiting examples of modified nucleotides are shown by Formulae I-VII and/or other modifications described herein.

[0320] In connection with 2′-modified nucleotides as described for the present invention, by “amino” is meant 2′-NH₂ or 2′-O—NH₂, which can be modified or unmodified. Such modified groups are described, for example, in Eckstein et al., U.S. Pat. No. 5,672,695 and Matulic-Adamic et al., U.S. Pat. No. 6,248,878, which are both incorporated by reference in their entireties.

[0321] Various modifications to nucleic acid siNA structure can be made to enhance the utility of these molecules. Such modifications will enhance shelf-life, half-life in vitro, stability, and ease of introduction of such oligonucleotides to the target site, e.g., to enhance penetration of cellular membranes, and confer the ability to recognize and bind to targeted cells.

Administration of Nucleic Acid Molecules

[0322] A siNA molecule of the invention can be adapted for use to prevent or treat a variety of neurodegenerative diseases, including Alzheimer's disease, dementia, stroke (CVA), or any other trait, disease or condition that is related to or will respond to the levels of BACE in a cell or tissue, alone or in combination with other therapies.

[0323] For example, a siNA molecule can comprise a delivery vehicle, including liposomes, for administration to a subject, carriers and diluents and their salts, and/or can be present in pharmaceutically acceptable formulations. Methods for the delivery of nucleic acid molecules are described in Akhtar et al., 1992, Trends Cell Bio., 2, 139; Delivery Strategies for Antisense Oligonucleotide Therapeutics, ed. Akhtar, 1995, Maurer et al., 1999, Mol. Membr. Biol., 16, 129-140; Hofland and Huang, 1999, Handb. Exp. Pharmacol., 137, 165-192; and Lee et al., 2000, ACS Symp. Ser., 752, 184-192, all of which are incorporated herein by reference. Beigelman et al., U.S. Pat. No. 6,395,713 and Sullivan et al., PCT WO 94/02595 further describe the general methods for delivery of nucleic acid molecules. These protocols can be utilized for the delivery of virtually any nucleic acid molecule. Nucleic acid molecules can be administered to cells by a variety of methods known to those of skill in the art, including, but not restricted to, encapsulation in liposomes, by iontophoresis, or by incorporation into other vehicles, such as biodegradable polymers, hydrogels, cyclodextrins (see for example Gonzalez et al., 1999, Bioconjugate Chem., 10, 1068-1074; Wang et al., International PCT publication Nos. WO 03/47518 and WO 03/46185), poly(lactic-co-glycolic)acid (PLGA) and PLCA microspheres (see for example U.S. Pat. No. 6,447,796 and U.S. Patent Application Publication No. U.S. 2002130430), biodegradable nanocapsules, and bioadhesive microspheres, or by proteinaceous vectors (O'Hare and Normand, International PCT Publication No. WO 00/53722). In another embodiment, the nucleic acid molecules of the invention can also be formulated or complexed with polyethyleneimine and derivatives thereof, such as polyethyleneimine-polyethyleneglycol-N-acetylgalactosamine (PEI-PEG-GAL) or polyethyleneimine-polyethyleneglycol-tri-N-acetylgalactosamine (PEI-PEG-triGAL) derivatives.

[0324] In one embodiment, a siNA molecule of the invention is complexed with membrane disruptive agents such as those described in U.S. Patent Application Publication No. 20010007666, incorporated by reference herein in its entirety including the drawings. In another embodiment, the membrane disruptive agent or agents and the siNA molecule are also complexed with a cationic lipid or helper lipid molecule, such as those lipids described in U.S. Pat. No. 6,235,310, incorporated by reference herein in its entirety including the drawings.

[0325] In one embodiment, a siNA molecule of the invention is complexed with delivery systems as described in U.S. Patent Application Publication No. 2003077829 and International PCT Publication Nos. WO 00/03683 and WO 02/087541, all incorporated by reference herein in their entirety including the drawings.

[0326] In one embodiment, siNA molecules of the invention are formulated or complexed with polyethylenimine (e.g., linear or branched PEI) and/or polyethylenimine derivatives, including for example grafted PEIs such as galactose PEI, cholesterol PEI, antibody derivatized PEI, and polyethylene glycol PEI (PEG-PEI) derivatives thereof (see for example Ogris et al., 2001, AAPA PharmSci, 3, 1-11; Furgeson et al., 2003, Bioconjugate Chem., 14, 840-847; Kunath et al., 2002, Phramaceutical Research, 19, 810-817; Choi et al., 2001, Bull. Korean Chem. Soc., 22, 46-52; Bettinger et al., 1999, Bioconjugate Chem., 10, 558-561; Peterson et al., 2002, Bioconjugate Chem., 13, 845-854; Erbacher et al., 1999, Journal of Gene Medicine Preprint, 1, 1-18; Godbey et al., 1999, PNAS USA, 96, 5177-5181; Godbey et al., 1999, Journal of Controlled Release, 60, 149-160; Diebold et al., 1999, Journal of Biological Chemistry, 274, 19087-19094; Thomas and Klibanov, 2002, PNAS USA, 99, 14640-14645; and Sagara, U.S. Pat. No. 6,586,524, incorporated by reference herein.

[0327] In one embodiment, a siNA molecule of the invention comprises a bioconjugate, for example a nucleic acid conjugate as described in Vargeese et al., U.S. Ser. No. 10/427,160, filed Apr. 30, 2003; U.S. Pat. No. 6,528,631; U.S. Pat. No. 6,335,434; U.S. Pat. No. 6,235,886; U.S. Pat. No. 6,153,737; U.S. Pat. No. 5,214,136; U.S. Pat. No. 5,138,045, all incorporated by reference herein.

[0328] Thus, the invention features a pharmaceutical composition comprising one or more nucleic acid(s) of the invention in an acceptable carrier, such as a stabilizer, buffer, and the like. The polynucleotides of the invention can be administered (e.g., RNA, DNA or protein) and introduced to a subject by any standard means, with or without stabilizers, buffers, and the like, to form a pharmaceutical composition. When it is desired to use a liposome delivery mechanism, standard protocols for formation of liposomes can be followed. The compositions of the present invention can also be formulated and used as creams, gels, sprays, oils and other suitable compositions for topical, dermal, or transdermal administration as is known in the art.

[0329] The present invention also includes pharmaceutically acceptable formulations of the compounds described. These formulations include salts of the above compounds, e.g., acid addition salts, for example, salts of hydrochloric, hydrobromic, acetic acid, and benzene sulfonic acid.

[0330] A pharmacological composition or formulation refers to a composition or formulation in a form suitable for administration, e.g., systemic or local administration, into a cell or subject, including for example a human. Suitable forms, in part, depend upon the use or the route of entry, for example oral, transdermal, or by injection. Such forms should not prevent the composition or formulation from reaching a target cell (i.e., a cell to which the negatively charged nucleic acid is desirable for delivery). For example, pharmacological compositions injected into the blood stream should be soluble. Other factors are known in the art, and include considerations such as toxicity and forms that prevent the composition or formulation from exerting its effect.

[0331] In one embodiment, the invention features the use of methods to deliver the nucleic acid molecules of the instant invention to the central nervous system and/or peripheral nervous system. Experiments have demonstrated the efficient in vivo uptake of nucleic acids by neurons. As an example of local administration of nucleic acids to nerve cells, Sommer et al., 1998, Antisense Nuc. Acid Drug Dev., 8, 75, describe a study in which a 15mer phosphorothioate antisense nucleic acid molecule to c-fos is administered to rats via microinjection into the brain. Antisense molecules labeled with tetramethylrhodamine-isothiocyanate (TRITC) or fluorescein isothiocyanate (FITC) were taken up by exclusively by neurons thirty minutes post-injection. A diffuse cytoplasmic staining and nuclear staining was observed in these cells. As an example of systemic administration of nucleic acid to nerve cells, Epa et al., 2000, Antisense Nuc. Acid Drug Dev., 10, 469, describe an in vivo mouse study in which beta-cyclodextrin-adamantane-oligonucleotide conjugates were used to target the p75 neurotrophin receptor in neuronally differentiated PC12 cells. Following a two week course of IP administration, pronounced uptake of p75 neurotrophin receptor antisense was observed in dorsal root ganglion (DRG) cells. In addition, a marked and consistent down-regulation of p75 was observed in DRG neurons. Additional approaches to the targeting of nucleic acid to neurons are described in Broaddus et al., 1998, J. Neurosurg., 88(4), 734; Karle et al., 1997, Eur. J. Pharmocol., 340(2/3), 153; Bannai et al., 1998, Brain Research, 784(1,2), 304; Rajakumar et al., 1997, Synapse, 26(3), 199; Wu-pong et al., 1999, BioPharm, 12(1), 32; Bannai et al., 1998, Brain Res. Protoc., 3(1), 83; Simantov et al., 1996, Neuroscience, 74(1), 39. Nucleic acid molecules of the invention are therefore amenable to delivery to and uptake by cells that express repeat expansion allelic variants for modulation of RE gene expression. The delivery of nucleic acid molecules of the invention, targeting RE is provided by a variety of different strategies. Traditional approaches to CNS delivery that can be used include, but are not limited to, intrathecal and intracerebroventricular administration, implantation of catheters and pumps, direct injection or perfusion at the site of injury or lesion, injection into the brain arterial system, or by chemical or osmotic opening of the blood-brain barrier. Other approaches can include the use of various transport and carrier systems, for example though the use of conjugates and biodegradable polymers. Furthermore, gene therapy approaches, for example as described in Kaplitt et al., U.S. Pat. No. 6,180,613 and Davidson, WO 04/013280, can be used to express nucleic acid molecules in the CNS.

[0332] In one embodiment, nucleic acid molecules of the invention are administered to the central nervous system (CNS) or peripheral nervous system (PNS). Experiments have demonstrated the efficient in vivo uptake of nucleic acids by neurons. As an example of local administration of nucleic acids to nerve cells, Sommer et al., 1998, Antisense Nuc. Acid Drug Dev., 8, 75, describe a study in which a 15mer phosphorothioate antisense nucleic acid molecule to c-fos is administered to rats via microinjection into the brain. Antisense molecules labeled with tetramethylrhodamine-isothiocyanate (TRITC) or fluorescein isothiocyanate (FITC) were taken up by exclusively by neurons thirty minutes post-injection. A diffuse cytoplasmic staining and nuclear staining was observed in these cells. As an example of systemic administration of nucleic acid to nerve cells, Epa et al., 2000, Antisense Nuc. Acid Drug Dev., 10, 469, describe an in vivo mouse study in which beta-cyclodextrin-adamantane-oligonucleotide conjugates were used to target the p75 neurotrophin receptor in neuronally differentiated PC12 cells. Following a two week course of IP administration, pronounced uptake of p75 neurotrophin receptor antisense was observed in dorsal root ganglion (DRG) cells. In addition, a marked and consistent down-regulation of p75 was observed in DRG neurons. Additional approaches to the targeting of nucleic acid to neurons are described in Broaddus et al., 1998, J. Neurosurg., 88(4), 734; Karle et al., 1997, Eur. J. Pharmocol., 340(2/3), 153; Bannai et al., 1998, Brain Research, 784(1,2), 304; Rajakumar et al., 1997, Synapse, 26(3), 199; Wu-pong et al., 1999, BioPharm, 12(1), 32; Bannai et al., 1998, Brain Res. Protoc., 3(1), 83; Simantov et al., 1996, Neuroscience, 74(1), 39. Nucleic acid molecules of the invention are therefore amenable to delivery to and uptake by cells in the CNS and/or PNS.

[0333] The delivery of nucleic acid molecules of the invention to the CNS is provided by a variety of different strategies. Traditional approaches to CNS delivery that can be used include, but are not limited to, intrathecal and intracerebroventricular administration, implantation of catheters and pumps, direct injection or perfusion at the site of injury or lesion, injection into the brain arterial system, or by chemical or osmotic opening of the blood-brain barrier. Other approaches can include the use of various transport and carrier systems, for example though the use of conjugates and biodegradable polymers. Furthermore, gene therapy approaches, for example as described in Kaplitt et al., U.S. Pat. No. 6,180,613 and Davidson, WO 04/013280, can be used to express nucleic acid molecules in the CNS.

[0334] In one embodiment, dermal delivery systems of the invention include, for example, aqueous and nonaqueous gels, creams, multiple emulsions, microemulsions, liposomes, ointments, aqueous and nonaqueous solutions, lotions, aerosols, hydrocarbon bases and powders, and can contain excipients such as solubilizers, permeation enhancers (e.g., fatty acids, fatty acid esters, fatty alcohols and amino acids), and hydrophilic polymers (e.g., polycarbophil and polyvinylpyrolidone). In one embodiment, the pharmaceutically acceptable carrier is a liposome or a transdermal enhancer. Examples of liposomes which can be used in this invention include the following: (1) CellFectin, 1:1.5 (M/M) liposome formulation of the cationic lipid N,NI,NII,NIII-tetramethyl-N,NI,NII,NIII-tetrapalmit-y-spermine and dioleoyl phosphatidylethanolamine (DOPE) (GIBCO BRL); (2) Cytofectin GSV, 2:1 (M/M) liposome formulation of a cationic lipid and DOPE (Glen Research); (3) DOTAP (N-[1-(2,3-dioleoyloxy)-N,N,N-tri-methyl-ammoniummethylsulfate) (Boehringer Manheim); and (4) Lipofectamine, 3:1 (M/M) liposome formulation of the polycationic lipid DOSPA and the neutral lipid DOPE (GIBCO BRL).

[0335] In one embodiment, siNA molecules of the invention are administered to a subject by systemic administration in a pharmaceutically acceptable composition or formulation. By “systemic administration” is meant in vivo systemic absorption or accumulation of drugs in the blood stream followed by distribution throughout the entire body. Administration routes that lead to systemic absorption include, without limitation: intravenous, subcutaneous, intraperitoneal, inhalation, oral, intrapulmonary and intramuscular. Each of these administration routes exposes the siNA molecules of the invention to an accessible diseased tissue. The rate of entry of a drug into the circulation has been shown to be a function of molecular weight or size. The use of a liposome or other drug carrier comprising the compounds of the instant invention can potentially localize the drug, for example, in certain tissue types, such as the tissues of the reticular endothelial system (RES). A liposome formulation that can facilitate the association of drug with the surface of cells, such as, lymphocytes and macrophages is also useful. This approach can provide enhanced delivery of the drug to target cells by taking advantage of the specificity of macrophage and lymphocyte immune recognition of abnormal cells.

[0336] In one embodiment, siNA molecules of the invention are formulated or complexed with polyethylenimine (e.g., linear or branched PEI) and/or polyethylenimine derivatives, including for example grafted PEIs such as galactose PEI, cholesterol PEI, antibody derivatized PEI, and polyethylene glycol PEI (PEG-PEI) derivatives thereof (see for example Ogris et al., 2001, AAPA PharmSci, 3, 1-11; Furgeson et al., 2003, Bioconjugate Chem., 14, 840-847; Kunath et al., 2002, Phramaceutical Research, 19, 810-817; Choi et al., 2001, Bull. Korean Chem. Soc., 22, 46-52; Bettinger et al., 1999, Bioconjugate Chem., 10, 558-561; Peterson et al., 2002, Bioconjugate Chem., 13, 845-854; Erbacher et al., 1999, Journal of Gene Medicine Preprint, 1, 1-18; Godbey et al., 1999, PNAS USA, 96, 5177-5181; Godbey et al., 1999, Journal of Controlled Release, 60, 149-160; Diebold et al., 1999, Journal of Biological Chemistry, 274, 19087-19094; Thomas and Klibanov, 2002, PNAS USA, 99, 14640-14645; and Sagara, U.S. Pat. No. 6,586,524, incorporated by reference herein.

[0337] By “pharmaceutically acceptable formulation” or “pharmaceutically acceptable composition” is meant a composition or formulation that allows for the effective distribution of the nucleic acid molecules of the instant invention in the physical location most suitable for their desired activity. Non-limiting examples of agents suitable for formulation with the nucleic acid molecules of the instant invention include: P-glycoprotein inhibitors (such as Pluronic P85); biodegradable polymers, such as poly (DL-lactide-coglycolide) microspheres for sustained release delivery (Emerich, D F et al, 1999, Cell Transplant, 8, 47-58); and loaded nanoparticles, such as those made of polybutylcyanoacrylate. Other non-limiting examples of delivery strategies for the nucleic acid molecules of the instant invention include material described in Boado et al., 1998, J. Pharm. Sci., 87, 1308-1315; Tyler et al., 1999, FEBS Lett., 421, 280-284; Pardridge et al., 1995, PNAS USA., 92, 5592-5596; Boado, 1995, Adv. Drug Delivery Rev., 15, 73-107; Aldrian-Herrada et al., 1998, Nucleic Acids Res., 26, 4910-4916; and Tyler et al., 1999, PNAS USA., 96, 7053-7058.

[0338] The invention also features the use of the composition comprising surface-modified liposomes containing poly (ethylene glycol) lipids (PEG-modified, or long-circulating liposomes or stealth liposomes). These formulations offer a method for increasing the accumulation of drugs in target tissues. This class of drug carriers resists opsonization and elimination by the mononuclear phagocytic system (MPS or RES), thereby enabling longer blood circulation times and enhanced tissue exposure for the encapsulated drug (Lasic et al. Chem. Rev. 1995, 95, 2601-2627; Ishiwata et al., Chem. Pharm. Bull. 1995, 43, 1005-1011). Such liposomes have been shown to accumulate selectively in tumors, presumably by extravasation and capture in the neovascularized target tissues (Lasic et al., Science 1995, 267, 1275-1276; Oku et al., 1995, Biochim. Biophys. Acta, 1238, 86-90). The long-circulating liposomes enhance the pharmacokinetics and pharmacodynamics of DNA and RNA, particularly compared to conventional cationic liposomes which are known to accumulate in tissues of the MPS (Liu et al., J. Biol. Chem. 1995, 42, 24864-24870; Choi et al., International PCT Publication No. WO 96/10391; Ansell et al., International PCT Publication No. WO 96/10390; Holland et al., International PCT Publication No. WO 96/10392). Long-circulating liposomes are also likely to protect drugs from nuclease degradation to a greater extent compared to cationic liposomes, based on their ability to avoid accumulation in metabolically aggressive MPS tissues such as the liver and spleen.

[0339] The present invention also includes compositions prepared for storage or administration that include a pharmaceutically effective amount of the desired compounds in a pharmaceutically acceptable carrier or diluent. Acceptable carriers or diluents for therapeutic use are well known in the pharmaceutical art, and are described, for example, in Remington's Pharmaceutical Sciences, Mack Publishing Co. (A. R. Gennaro edit. 1985), hereby incorporated by reference herein. For example, preservatives, stabilizers, dyes and flavoring agents can be provided. These include sodium benzoate, sorbic acid and esters of p-hydroxybenzoic acid. In addition, antioxidants and suspending agents can be used.

[0340] A pharmaceutically effective dose is that dose required to prevent, inhibit the occurrence, or treat (alleviate a symptom to some extent, preferably all of the symptoms) of a disease state. The pharmaceutically effective dose depends on the type of disease, the composition used, the route of administration, the type of mammal being treated, the physical characteristics of the specific mammal under consideration, concurrent medication, and other factors that those skilled in the medical arts will recognize. Generally, an amount between 0.1 mg/kg and 100 mg/kg body weight/day of active ingredients is administered dependent upon potency of the negatively charged polymer.

[0341] The nucleic acid molecules of the invention and formulations thereof can be administered orally, topically, parenterally, by inhalation or spray, or rectally in dosage unit formulations containing conventional non-toxic pharmaceutically acceptable carriers, adjuvants and/or vehicles. The term parenteral as used herein includes percutaneous, subcutaneous, intravascular (e.g., intravenous), intramuscular, or intrathecal injection or infusion techniques and the like. In addition, there is provided a pharmaceutical formulation comprising a nucleic acid molecule of the invention and a pharmaceutically acceptable carrier. One or more nucleic acid molecules of the invention can be present in association with one or more non-toxic pharmaceutically acceptable carriers and/or diluents and/or adjuvants, and if desired other active ingredients. The pharmaceutical compositions containing nucleic acid molecules of the invention can be in a form suitable for oral use, for example, as tablets, troches, lozenges, aqueous or oily suspensions, dispersible powders or granules, emulsion, hard or soft capsules, or syrups or elixirs.

[0342] Compositions intended for oral use can be prepared according to any method known to the art for the manufacture of pharmaceutical compositions and such compositions can contain one or more such sweetening agents, flavoring agents, coloring agents or preservative agents in order to provide pharmaceutically elegant and palatable preparations. Tablets contain the active ingredient in admixture with non-toxic pharmaceutically acceptable excipients that are suitable for the manufacture of tablets. These excipients can be, for example, inert diluents; such as calcium carbonate, sodium carbonate, lactose, calcium phosphate or sodium phosphate; granulating and disintegrating agents, for example, corn starch, or alginic acid; binding agents, for example starch, gelatin or acacia; and lubricating agents, for example magnesium stearate, stearic acid or talc. The tablets can be uncoated or they can be coated by known techniques. In some cases such coatings can be prepared by known techniques to delay disintegration and absorption in the gastrointestinal tract and thereby provide a sustained action over a longer period. For example, a time delay material such as glyceryl monosterate or glyceryl distearate can be employed.

[0343] Formulations for oral use can also be presented as hard gelatin capsules wherein the active ingredient is mixed with an inert solid diluent, for example, calcium carbonate, calcium phosphate or kaolin, or as soft gelatin capsules wherein the active ingredient is mixed with water or an oil medium, for example peanut oil, liquid paraffin or olive oil.

[0344] Aqueous suspensions contain the active materials in a mixture with excipients suitable for the manufacture of aqueous suspensions. Such excipients are suspending agents, for example sodium carboxymethylcellulose, methylcellulose, hydropropyl-methylcellulose, sodium alginate, polyvinylpyrrolidone, gum tragacanth and gum acacia; dispersing or wetting agents can be a naturally-occurring phosphatide, for example, lecithin, or condensation products of an alkylene oxide with fatty acids, for example polyoxyethylene stearate, or condensation products of ethylene oxide with long chain aliphatic alcohols, for example heptadecaethyleneoxycetanol, or condensation products of ethylene oxide with partial esters derived from fatty acids and a hexitol such as polyoxyethylene sorbitol monooleate, or condensation products of ethylene oxide with partial esters derived from fatty acids and hexitol anhydrides, for example polyethylene sorbitan monooleate. The aqueous suspensions can also contain one or more preservatives, for example ethyl, or n-propyl p-hydroxybenzoate, one or more coloring agents, one or more flavoring agents, and one or more sweetening agents, such as sucrose or saccharin.

[0345] Oily suspensions can be formulated by suspending the active ingredients in a vegetable oil, for example arachis oil, olive oil, sesame oil or coconut oil, or in a mineral oil such as liquid paraffin. The oily suspensions can contain a thickening agent, for example beeswax, hard paraffin or cetyl alcohol. Sweetening agents and flavoring agents can be added to provide palatable oral preparations. These compositions can be preserved by the addition of an anti-oxidant such as ascorbic acid.

[0346] Dispersible powders and granules suitable for preparation of an aqueous suspension by the addition of water provide the active ingredient in admixture with a dispersing or wetting agent, suspending agent and one or more preservatives. Suitable dispersing or wetting agents or suspending agents are exemplified by those already mentioned above. Additional excipients, for example sweetening, flavoring and coloring agents, can also be present.

[0347] Pharmaceutical compositions of the invention can also be in the form of oil-in-water emulsions. The oily phase can be a vegetable oil or a mineral oil or mixtures of these. Suitable emulsifying agents can be naturally-occurring gums, for example gum acacia or gum tragacanth, naturally-occurring phosphatides, for example soy bean, lecithin, and esters or partial esters derived from fatty acids and hexitol, anhydrides, for example sorbitan monooleate, and condensation products of the said partial esters with ethylene oxide, for example polyoxyethylene sorbitan monooleate. The emulsions can also contain sweetening and flavoring agents.

[0348] Syrups and elixirs can be formulated with sweetening agents, for example glycerol, propylene glycol, sorbitol, glucose or sucrose. Such formulations can also contain a demulcent, a preservative and flavoring and coloring agents. The pharmaceutical compositions can be in the form of a sterile injectable aqueous or oleaginous suspension. This suspension can be formulated according to the known art using those suitable dispersing or wetting agents and suspending agents that have been mentioned above. The sterile injectable preparation can also be a sterile injectable solution or suspension in a non-toxic parentally acceptable diluent or solvent, for example as a solution in 1,3-butanediol. Among the acceptable vehicles and solvents that can be employed are water, Ringer's solution and isotonic sodium chloride solution. In addition, sterile, fixed oils are conventionally employed as a solvent or suspending medium. For this purpose, any bland fixed oil can be employed including synthetic mono-or diglycerides. In addition, fatty acids such as oleic acid find use in the preparation of injectables.

[0349] The nucleic acid molecules of the invention can also be administered in the form of suppositories, e.g., for rectal administration of the drug. These compositions can be prepared by mixing the drug with a suitable non-irritating excipient that is solid at ordinary temperatures but liquid at the rectal temperature and will therefore melt in the rectum to release the drug. Such materials include cocoa butter and polyethylene glycols.

[0350] Nucleic acid molecules of the invention can be administered parenterally in a sterile medium. The drug, depending on the vehicle and concentration used, can either be suspended or dissolved in the vehicle. Advantageously, adjuvants such as local anesthetics, preservatives and buffering agents can be dissolved in the vehicle.

[0351] Dosage levels of the order of from about 0.1 mg to about 140 mg per kilogram of body weight per day are useful in the treatment of the above-indicated conditions (about 0.5 mg to about 7 g per subject per day). The amount of active ingredient that can be combined with the carrier materials to produce a single dosage form varies depending upon the host treated and the particular mode of administration. Dosage unit forms generally contain between from about 1 mg to about 500 mg of an active ingredient.

[0352] It is understood that the specific dose level for any particular subject depends upon a variety of factors including the activity of the specific compound employed, the age, body weight, general health, sex, diet, time of administration, route of administration, and rate of excretion, drug combination and the severity of the particular disease undergoing therapy.

[0353] For administration to non-human animals, the composition can also be added to the animal feed or drinking water. It can be convenient to formulate the animal feed and drinking water compositions so that the animal takes in a therapeutically appropriate quantity of the composition along with its diet. It can also be convenient to present the composition as a premix for addition to the feed or drinking water.

[0354] The nucleic acid molecules of the present invention can also be administered to a subject in combination with other therapeutic compounds to increase the overall therapeutic effect. The use of multiple compounds to treat an indication can increase the beneficial effects while reducing the presence of side effects.

[0355] Alternatively, certain siNA molecules of the instant invention can be expressed within cells from eukaryotic promoters (e.g., Izant and Weintraub, 1985, Science, 229, 345; McGarry and Lindquist, 1986, Proc. Natl. Acad. Sci., USA 83, 399; Scanlon et al., 1991, Proc. Natl. Acad. Sci. USA, 88, 10591-5; Kashani-Sabet et al., 1992, Antisense Res. Dev., 2, 3-15; Dropulic et al., 1992, J. Virol., 66, 1432-41; Weerasinghe et al., 1991, J. Virol., 65, 5531-4; Ojwang et al., 1992, Proc. Natl. Acad. Sci. USA, 89, 10802-6; Chen et al., 1992, Nucleic Acids Res., 20, 4581-9; Sarver et al., 1990 Science, 247, 1222-1225; Thompson et al., 1995, Nucleic Acids Res., 23, 2259; Good et al., 1997, Gene Therapy, 4, 45. Those skilled in the art realize that any nucleic acid can be expressed in eukaryotic cells from the appropriate DNA/RNA vector. The activity of such nucleic acids can be augmented by their release from the primary transcript by a enzymatic nucleic acid (Draper et al., PCT WO 93/23569, and Sullivan et al., PCT WO 94/02595; Ohkawa et al., 1992, Nucleic Acids Symp. Ser., 27, 15-6; Taira et al., 1991, Nucleic Acids Res., 19, 5125-30; Ventura et al., 1993, Nucleic Acids Res., 21, 3249-55; Chowrira et al., 1994, J. Biol. Chem., 269, 25856.

[0356] In another aspect of the invention, RNA molecules of the present invention can be expressed from transcription units (see for example Couture et al., 1996, TIG., 12, 510) inserted into DNA or RNA vectors. The recombinant vectors can be DNA plasmids or viral vectors. siNA expressing viral vectors can be constructed based on, but not limited to, adeno-associated virus, retrovirus, adenovirus, or alphavirus. In another embodiment, pol III based constructs are used to express nucleic acid molecules of the invention (see for example Thompson, U.S. Pats. Nos. 5,902,880 and 6,146,886). The recombinant vectors capable of expressing the siNA molecules can be delivered as described above, and persist in target cells. Alternatively, viral vectors can be used that provide for transient expression of nucleic acid molecules. Such vectors can be repeatedly administered as necessary. Once expressed, the siNA molecule interacts with the target mRNA and generates an RNAi response. Delivery of siNA molecule expressing vectors can be systemic, such as by intravenous or intra-muscular administration, by administration to target cells ex-planted from a subject followed by reintroduction into the subject, or by any other means that would allow for introduction into the desired target cell (for a review see Couture et al., 1996, TIG., 12, 510).

[0357] In one aspect the invention features an expression vector comprising a nucleic acid sequence encoding at least one siNA molecule of the instant invention. The expression vector can encode one or both strands of a siNA duplex, or a single self-complementary strand that self hybridizes into a siNA duplex. The nucleic acid sequences encoding the siNA molecules of the instant invention can be operably linked in a manner that allows expression of the siNA molecule (see for example Paul et al., 2002, Nature Biotechnology, 19, 505; Miyagishi and Taira, 2002, Nature Biotechnology, 19, 497; Lee et al., 2002, Nature Biotechnology, 19, 500; and Novina et al., 2002, Nature Medicine, advance online publication doi:10.1038/nm725).

[0358] In another aspect, the invention features an expression vector comprising: a) a transcription initiation region (e.g., eukaryotic pol I, II or III initiation region); b) a transcription termination region (e.g., eukaryotic pol I, II or III termination region); and c) a nucleic acid sequence encoding at least one of the siNA molecules of the instant invention, wherein said sequence is operably linked to said initiation region and said termination region in a manner that allows expression and/or delivery of the siNA molecule. The vector can optionally include an open reading frame (ORF) for a protein operably linked on the 5′ side or the 3′-side of the sequence encoding the siNA of the invention; and/or an intron (intervening sequences).

[0359] Transcription of the siNA molecule sequences can be driven from a promoter for eukaryotic RNA polymerase I (pol I), RNA polymerase II (pol II), or RNA polymerase III (pol III). Transcripts from pol II or pol III promoters are expressed at high levels in all cells; the levels of a given pol II promoter in a given cell type depends on the nature of the gene regulatory sequences (enhancers, silencers, etc.) present nearby. Prokaryotic RNA polymerase promoters are also used, providing that the prokaryotic RNA polymerase enzyme is expressed in the appropriate cells (Elroy-Stein and Moss, 1990, Proc. Natl. Acad. Sci. USA, 87, 6743-7; Gao and Huang 1993, Nucleic Acids Res., 21, 2867-72; Lieber et al., 1993, Methods Enzymol., 217, 47-66; Zhou et al., 1990, Mol. Cell. Biol., 10, 4529-37). Several investigators have demonstrated that nucleic acid molecules expressed from such promoters can function in mammalian cells (e.g. Kashani-Sabet et al., 1992, Antisense Res. Dev., 2, 3-15; Ojwang et al., 1992, Proc. Natl. Acad. Sci. USA, 89, 10802-6; Chen et al., 1992, Nucleic Acids Res., 20, 4581-9; Yu et al., 1993, Proc. Natl. Acad. Sci. USA, 90, 6340-4; L'Huillier et al., 1992, EMBO J, 11, 4411-8; Lisziewicz et al., 1993, Proc. Natl. Acad. Sci. U S. A, 90, 8000-4; Thompson et al., 1995, Nucleic Acids Res., 23, 2259; Sullenger & Cech, 1993, Science, 262, 1566). More specifically, transcription units such as the ones derived from genes encoding U6 small nuclear (snRNA), transfer RNA (tRNA) and adenovirus VA RNA are useful in generating high concentrations of desired RNA molecules such as siNA in cells (Thompson et al., supra; Couture and Stinchcomb, 1996, supra; Noonberg et al., 1994, Nucleic Acid Res., 22, 2830; Noonberg et al., U.S. Pat. No. 5,624,803; Good et al., 1997, Gene Ther., 4, 45; Beigelman et al., International PCT Publication No. WO 96/18736. The above siNA transcription units can be incorporated into a variety of vectors for introduction into mammalian cells, including but not restricted to, plasmid DNA vectors, viral DNA vectors (such as adenovirus or adeno-associated virus vectors), or viral RNA vectors (such as retroviral or alphavirus vectors) (for a review see Couture and Stinchcomb, 1996, supra).

[0360] In another aspect the invention features an expression vector comprising a nucleic acid sequence encoding at least one of the siNA molecules of the invention in a manner that allows expression of that siNA molecule. The expression vector comprises in one embodiment; a) a transcription initiation region; b) a transcription termination region; and c) a nucleic acid sequence encoding at least one strand of the siNA molecule, wherein the sequence is operably linked to the initiation region and the termination region in a manner that allows expression and/or delivery of the siNA molecule.

[0361] In another embodiment the expression vector comprises: a) a transcription initiation region; b) a transcription termination region; c) an open reading frame; and d) a nucleic acid sequence encoding at least one strand of a siNA molecule, wherein the sequence is operably linked to the 3′-end of the open reading frame and wherein the sequence is operably linked to the initiation region, the open reading frame and the termination region in a manner that allows expression and/or delivery of the siNA molecule. In yet another embodiment, the expression vector comprises: a) a transcription initiation region; b) a transcription termination region; c) an intron; and d) a nucleic acid sequence encoding at least one siNA molecule, wherein the sequence is operably linked to the initiation region, the intron and the termination region in a manner which allows expression and/or delivery of the nucleic acid molecule.

[0362] In another embodiment, the expression vector comprises: a) a transcription initiation region; b) a transcription termination region; c) an intron; d) an open reading frame; and e) a nucleic acid sequence encoding at least one strand of a siNA molecule, wherein the sequence is operably linked to the 3′-end of the open reading frame and wherein the sequence is operably linked to the initiation region, the intron, the open reading frame and the termination region in a manner which allows expression and/or delivery of the siNA molecule.

BACE, APP, PIN-1 and PS Biology and Biochemistry

[0363] Alzheimer's disease is characterized by the progressive formation of insoluble plaques and vascular deposits in the brain consisting of the 4 kD amyloid β peptide (Aβ). These plaques are characterized by dystrophic neurites that show profound synaptic loss, neurofibrillary tangle formation, and gliosis. Aβ arises from the proteolytic cleavage of the large type I transmembrane protein, β-amyloid precursor protein (APP) (Kang et al., 1987, Nature, 325, 733). Processing of APP to generate Aβ requires two sites of cleavage by a β-secretase and a γ-secretase. β-secretase cleavage of APP results in the cytoplasmic release of a 100 kD soluble amino-terminal fragment, APPsβ, leaving behind a 12 kD transmembrane carboxy-terminal fragment, C99. Alternately, APP can be cleaved by a α-secretase to generate cytoplasmic APPsα and transmembrane C83 fragments. Both remaining transmembrane fragments, C99 and C83, can be further cleaved by a γ-secretase, leading to the release and secretion of Alzheimer's related Aβ and a non-pathogenic peptide, p3, respectively (Vassar et al., 1999, Science, 286, 735-741). Early onset familial Alzheimer's disease is characterized by mutant APP protein with a Met to Leu substitution at position P1, characterized as the “Swedish” familial mutation (Mullan et al., 1992, Nature Genet., 1, 345). This APP mutation is characterized by a dramatic enhancement in β-secretase cleavage (Citron et al., 1992, Nature, 360, 672).

[0364] The identification of β-secretase and γ-secretase constituents involved in the release of β-amyloid protein is of primary importance in the development of treatment strategies for Alzheimer's disease. Characterization of α-secretase is also important in this regard since α-secretase cleavage may compete with β-secretase cleavage resulting in changes in the relative amounts of non-pathogenic and pathogenic protein production. Involvement of the two metalloproteases, ADAM 10 and TACE, has been demonstrated in α-cleavage of AAP (Buxbaum et al., 1999, J. Biol. Chem., 273, 27765, and Lammich et al., 1999, Proc. Natl. Acad. Sci. U.S.A., 96, 3922). Studies of γ-secretase activity have demonstrated presenilin dependence (De Stooper et al., 1998, Nature, 391, 387, and De Stooper et al., 1999, Nature, 398, 518), and as such, presenilins have been proposed as γ-secretase even though presenilin does not present proteolytic activity (Wolfe et al., 1999, Nature, 398, 513).

[0365] Studies have shown β-secretase cleavage of AAP by the transmembrane aspartic protease beta site APP cleaving enzyme, BACE (Vassar et al., supra). While other potential candidates for β-secretase have been proposed (for review see Evin et al., 1999, Proc. Natl. Acad. Sci. U.S.A., 96, 3922), none have demonstrated the full range of characteristics expected from this enzyme. Studies have shown that BACE expression and localization are as expected for β-secretase, that BACE overexpression in cells results in increased β-secretase cleavage of APP and Swedish APP, that isolated BACE demonstrates site specific proteolytic activity on APP derived peptide substrates, and that antisense mediated endogenous BACE inhibition results in dramatically reduced β-secretase activity (Vassar et al., supra).

[0366] Current treatment strategies for Alzheimer's disease rely on either the prevention or the alleviation of symptoms and/or the slowing down of disease progression. Two drugs approved in the treatment of Alzheimer's, donepezil (Aricept®) and tacrine (Cognex®), both cholinomimetics, attempt to slow the loss of cognitive ability by increasing the amount of acetylcholine available to the brain. Antioxidant therapy through the use of antioxidant compounds such as alpha-tocopherol (vitamin E), melatonin, and selegeline (Eldepryl®) attempt to slow disease progression by minimizing free radical damage. Estrogen replacement therapy is thought to incur a possible preventative benefit in the development of Alzheimer's disease based on limited data. The use of anti-inflammatory drugs may be associated with a reduced risk of Alzheimer's as well. Calcium channel blockers such as Nimodipine® are considered to have a potential benefit in treating Alzheimer's disease due to protection of nerve cells from calcium overload, thereby prolonging nerve cell survival. Nootropic compounds, such as acetyl-L-carnitine (Alcar®) and insulin, have been proposed to have some benefit in treating Alzheimer's due to enhancement of cognitive and memory function based on cellular metabolism.

[0367] Whereby the above treatment strategies can all improve quality of life in Alzheimer's patients, there exists an unmet need in the comprehensive treatment and prevention of this disease. As such, there exists the need for therapeutics effective in reversing the physiological changes associated with Alzheimer's disease, specifically, therapeutics that can eliminate and/or reverse the deposition of amyloid β peptide. The use of compounds, such as small nucleic acid molecules (e.g., short interfering nucleic acid (siNA), short interfering RNA (siRNA), double-stranded RNA (dsRNA), micro-RNA (miRNA), and short hairpin RNA (shRNA) molecules capable of mediating RNA interference (RNAi)), to modulate the expression of proteases that are instrumental in the release of amyloid β peptide, namely β-secretase (BACE), γ-secretase (presenilin), and the amyloid precursor protein (APP), is of therapeutic significance.

### EXAMPLES

[0368] The following are non-limiting examples showing the selection, isolation, synthesis and activity of nucleic acids of the instant invention.

### Example 1

### Tandem Synthesis of siNA Constructs

[0369] Exemplary siNA molecules of the invention are synthesized in tandem using a cleavable linker, for example, a succinyl-based linker. Tandem synthesis as described herein is followed by a one-step purification process that provides RNAi molecules in high yield. This approach is highly amenable to siNA synthesis in support of high throughput RNAi screening, and can be readily adapted to multi-column or multi-well synthesis platforms.

[0370] After completing a tandem synthesis of a siNA oligo and its complement in which the 5′-terminal dimethoxytrityl (5′-O-DMT) group remains intact (trityl on synthesis), the oligonucleotides are deprotected as described above. Following deprotection, the siNA sequence strands are allowed to spontaneously hybridize. This hybridization yields a duplex in which one strand has retained the 5′-O-DMT group while the complementary strand comprises a terminal 5′-hydroxyl. The newly formed duplex behaves as a single molecule during routine solid-phase extraction purification (Trityl-On purification) even though only one molecule has a dimethoxytrityl group. Because the strands form a stable duplex, this dimethoxytrityl group (or an equivalent group, such as other trityl groups or other hydrophobic moieties) is all that is required to purify the pair of oligos, for example, by using a C18 cartridge.

[0371] Standard phosphoramidite synthesis chemistry is used up to the point of introducing a tandem linker, such as an inverted deoxy abasic succinate or glyceryl succinate linker (see FIG. 1) or an equivalent cleavable linker. A non-limiting example of linker coupling conditions that can be used includes a hindered base such as diisopropylethylamine (DIPA) and/or DMAP in the presence of an activator reagent such as Bromotripyrrolidinophosphoniumhexaflurorophosphate (PyBrOP). After the linker is coupled, standard synthesis chemistry is utilized to complete synthesis of the second sequence leaving the terminal the 5′-O-DMT intact. Following synthesis, the resulting oligonucleotide is deprotected according to the procedures described herein and quenched with a suitable buffer, for example with 50 mM NaOAc or 1.5M NH₄H₂CO₃.

[0372] Purification of the siNA duplex can be readily accomplished using solid phase extraction, for example, using a Waters C18 SepPak 1 g cartridge conditioned with 1 column volume (CV) of acetonitrile, 2 CV H₂O, and 2 CV 50 mM NaOAc. The sample is loaded and then washed with 1 CV H₂O or 50 mM NaOAc. Failure sequences are eluted with 1 CV 14% ACN (Aqueous with 50 mM NaOAc and 50 mM NaCl). The column is then washed, for example with 1 CV H₂O followed by on-column detritylation, for example by passing 1 CV of 1% aqueous trifluoroacetic acid (TFA) over the column, then adding a second CV of 1% aqueous TFA to the column and allowing to stand for approximately 10 minutes. The remaining TFA solution is removed and the column washed with H20 followed by 1 CV 1M NaCl and additional H2O. The siNA duplex product is then eluted, for example, using 1 CV 20% aqueous CAN.

[0373] FIG. 2 provides an example of MALDI-TOF mass spectrometry analysis of a purified siNA construct in which each peak corresponds to the calculated mass of an individual siNA strand of the siNA duplex. The same purified siNA provides three peaks when analyzed by capillary gel electrophoresis (CGE), one peak presumably corresponding to the duplex siNA, and two peaks presumably corresponding to the separate siNA sequence strands. Ion exchange HPLC analysis of the same siNA contract only shows a single peak. Testing of the purified siNA construct using a luciferase reporter assay described below demonstrated the same RNAi activity compared to siNA constructs generated from separately synthesized oligonucleotide sequence strands.

### Example 2

### Identification of Potential siNA Target Sites in Any RNA Sequence

[0374] The sequence of an RNA target of interest, such as a viral or human mRNA transcript, is screened for target sites, for example by using a computer folding algorithm. In a non-limiting example, the sequence of a gene or RNA gene transcript derived from a database, such as Genbank, is used to generate siNA targets having complementarity to the target. Such sequences can be obtained from a database, or can be determined experimentally as known in the art. Target sites that are known, for example, those target sites determined to be effective target sites based on studies with other nucleic acid molecules, for example ribozymes or antisense, or those targets known to be associated with a disease or condition such as those sites containing mutations or deletions, can be used to design siNA molecules targeting those sites. Various parameters can be used to determine which sites are the most suitable target sites within the target RNA sequence. These parameters include but are not limited to secondary or tertiary RNA structure, the nucleotide base composition of the target sequence, the degree of homology between various regions of the target sequence, or the relative position of the target sequence within the RNA transcript. Based on these determinations, any number of target sites within the RNA transcript can be chosen to screen siNA molecules for efficacy, for example by using in vitro RNA cleavage assays, cell culture, or animal models. In a non-limiting example, anywhere from 1 to 1000 target sites are chosen within the transcript based on the size of the siNA construct to be used. High throughput screening assays can be developed for screening siNA molecules using methods known in the art, such as with multi-well or multi-plate assays to determine efficient reduction in target gene expression.

### Example 3

### Selection of siNA Molecule Target Sites in a RNA

[0375] The following non-limiting steps can be used to carry out the selection of siNAs targeting a given gene sequence or transcript.

[0376] 1. The target sequence is parsed in silico into a list of all fragments or subsequences of a particular length, for example 23 nucleotide fragments, contained within the target sequence. This step is typically carried out using a custom Perl script, but commercial sequence analysis programs such as Oligo, MacVector, or the GCG Wisconsin Package can be employed as well.

[0377] 2. In some instances the siNAs correspond to more than one target sequence; such would be the case for example in targeting different transcripts of the same gene, targeting different transcripts of more than one gene, or for targeting both the human gene and an animal homolog. In this case, a subsequence list of a particular length is generated for each of the targets, and then the lists are compared to find matching sequences in each list. The subsequences are then ranked according to the number of target sequences that contain the given subsequence; the goal is to find subsequences that are present in most or all of the target sequences. Alternately, the ranking can identify subsequences that are unique to a target sequence, such as a mutant target sequence. Such an approach would enable the use of siNA to target specifically the mutant sequence and not effect the expression of the normal sequence.

[0378] 3. In some instances the siNA subsequences are absent in one or more sequences while present in the desired target sequence; such would be the case if the siNA targets a gene with a paralogous family member that is to remain untargeted. As in case 2 above, a subsequence list of a particular length is generated for each of the targets, and then the lists are compared to find sequences that are present in the target gene but are absent in the untargeted paralog.

[0379] 4. The ranked siNA subsequences can be further analyzed and ranked according to GC content. A preference can be given to sites containing 30-70% GC, with a further preference to sites containing 40-60% GC.

[0380] 5. The ranked siNA subsequences can be further analyzed and ranked according to self-folding and internal hairpins. Weaker internal folds are preferred; strong hairpin structures are to be avoided.

[0381] 6. The ranked siNA subsequences can be further analyzed and ranked according to whether they have runs of GGG or CCC in the sequence. GGG (or even more Gs) in either strand can make oligonucleotide synthesis problematic and can potentially interfere with RNAi activity, so it is avoided whenever better sequences are available. CCC is searched in the target strand because that will place GGG in the antisense strand.

[0382] 7. The ranked siNA subsequences can be further analyzed and ranked according to whether they have the dinucleotide UU (uridine dinucleotide) on the 3′-end of the sequence, and/or AA on the 5′-end of the sequence (to yield 3′ UU on the antisense sequence). These sequences allow one to design siNA molecules with terminal TT thymidine dinucleotides.

[0383] 8. Four or five target sites are chosen from the ranked list of subsequences as described above. For example, in subsequences having 23 nucleotides, the right 21 nucleotides of each chosen 23-mer subsequence are then designed and synthesized for the upper (sense) strand of the siNA duplex, while the reverse complement of the left 21 nucleotides of each chosen 23-mer subsequence are then designed and synthesized for the lower (antisense) strand of the siNA duplex (see Tables II and III). If terminal TT residues are desired for the sequence (as described in paragraph 7), then the two 3′ terminal nucleotides of both the sense and antisense strands are replaced by TT prior to synthesizing the oligos.

[0384] 9. The siNA molecules are screened in an in vitro, cell culture or animal model system to identify the most active siNA molecule or the most preferred target site within the target RNA sequence.

[0385] 10. Other design considerations can be used when selecting target nucleic acid sequences, see, for example, Reynolds et al., 2004, Nature Biotechnology Advanced Online Publication, 1 Feb. 2004, doi:10.1038/nbt936 and Ui-Tei et al., 2004, Nucleic Acids Research, 32, doi:10.1093/nar/gkh247.

[0386] In an alternate approach, a pool of siNA constructs specific to a BACE target sequence is used to screen for target sites in cells expressing BACE RNA, such as cultured A549 cells, 7PA2 cells, Chinese hamster ovary (CHO) cells, or APPsw (Swedish type amyloid precursor protein expressing) cells. The general strategy used in this approach is shown in FIG. 9. A non-limiting example of such is a pool comprising sequences having any of SEQ ID NOS 1-1900. Cells expressing BACE (e.g., A549 cells) are transfected with the pool of siNA constructs and cells that demonstrate a phenotype associated with BACE inhibition are sorted. The pool of siNA constructs can be expressed from transcription cassettes inserted into appropriate vectors (see for example FIG. 7 and FIG. 8). The siNA from cells demonstrating a positive phenotypic change (e.g., decreased proliferation, decreased BACE mRNA levels or decreased BACE protein expression), are sequenced to determine the most suitable target site(s) within the target BACE RNA sequence.

### Example 4

### BACE Targeted siNA Design

[0387] siNA target sites were chosen by analyzing sequences of the BACE RNA target and optionally prioritizing the target sites on the basis of folding (structure of any given sequence analyzed to determine siNA accessibility to the target), by using a library of siNA molecules as described in Example 3, or alternately by using an in vitro siNA system as described in Example 6 herein. siNA molecules were designed that could bind each target and are optionally individually analyzed by computer folding to assess whether the siNA molecule can interact with the target sequence. Varying the length of the siNA molecules can be chosen to optimize activity. Generally, a sufficient number of complementary nucleotide bases are chosen to bind to, or otherwise interact with, the target RNA, but the degree of complementarity can be modulated to accommodate siNA duplexes or varying length or base composition. By using such methodologies, siNA molecules can be designed to target sites within any known RNA sequence, for example those RNA sequences corresponding to the any gene transcript.

[0388] Chemically modified siNA constructs are designed to provide nuclease stability for systemic administration in vivo and/or improved pharmacokinetic, localization, and delivery properties while preserving the ability to mediate RNAi activity. Chemical modifications as described herein are introduced synthetically using synthetic methods described herein and those generally known in the art. The synthetic siNA constructs are then assayed for nuclease stability in serum and/or cellular/tissue extracts (e.g. liver extracts). The synthetic siNA constructs are also tested in parallel for RNAi activity using an appropriate assay, such as a luciferase reporter assay as described herein or another suitable assay that can quantity RNAi activity. Synthetic siNA constructs that possess both nuclease stability and RNAi activity can be further modified and re-evaluated in stability and activity assays. The chemical modifications of the stabilized active siNA constructs can then be applied to any siNA sequence targeting any chosen RNA and used, for example, in target screening assays to pick lead siNA compounds for therapeutic development (see for example FIG. 11).

### Example 5

### Chemical Synthesis and Purification of siNA

[0389] siNA molecules can be designed to interact with various sites in the RNA message, for example, target sequences within the RNA sequences described herein. The sequence of one strand of the siNA molecule(s) is complementary to the target site sequences described above. The siNA molecules can be chemically synthesized using methods described herein. Inactive siNA molecules that are used as control sequences can be synthesized by scrambling the sequence of the siNA molecules such that it is not complementary to the target sequence. Generally, siNA constructs can by synthesized using solid phase oligonucleotide synthesis methods as described herein (see for example Usman et al., U.S. Pat. Nos. 5,804,683; 5,831,071; 5,998,203; 6,117,657; 6,353,098; 6,362,323; 6,437,117; 6,469,158; Scaringe et al., U.S. Pat. Nos. 6,111,086; 6,008,400; 6,111,086 all incorporated by reference herein in their entirety).

[0390] In a non-limiting example, RNA oligonucleotides are synthesized in a stepwise fashion using the phosphoramidite chemistry as is known in the art. Standard phosphoramidite chemistry involves the use of nucleosides comprising any of 5′-O-dimethoxytrityl, 2′-O-tert-butyldimethylsilyl, 3′-O-2-Cyanoethyl N,N-diisopropylphos-phoroamidite groups, and exocyclic amine protecting groups (e.g. N6-benzoyl adenosine, N4 acetyl cytidine, and N2-isobutyryl guanosine). Alternately, 2′-O-Silyl Ethers can be used in conjunction with acid-labile 2′-O-orthoester protecting groups in the synthesis of RNA as described by Scaringe supra. Differing 2′ chemistries can require different protecting groups, for example 2′-deoxy-2′-amino nucleosides can utilize N-phthaloyl protection as described by Usman et al., U.S. Pat. No. 5,631,360, incorporated by reference herein in its entirety).

[0391] During solid phase synthesis, each nucleotide is added sequentially (3′- to 5′-direction) to the solid support-bound oligonucleotide. The first nucleoside at the 3′-end of the chain is covalently attached to a solid support (e.g., controlled pore glass or polystyrene) using various linkers. The nucleotide precursor, a ribonucleoside phosphoramidite, and activator are combined resulting in the coupling of the second nucleoside phosphoramidite onto the 5′-end of the first nucleoside. The support is then washed and any unreacted 5′-hydroxyl groups are capped with a capping reagent such as acetic anhydride to yield inactive 5′-acetyl moieties. The trivalent phosphorus linkage is then oxidized to a more stable phosphate linkage. At the end of the nucleotide addition cycle, the 5′-O-protecting group is cleaved under suitable conditions (e.g., acidic conditions for trityl-based groups and Fluoride for silyl-based groups). The cycle is repeated for each subsequent nucleotide.

[0392] Modification of synthesis conditions can be used to optimize coupling efficiency, for example by using differing coupling times, differing reagent/phosphoramidite concentrations, differing contact times, differing solid supports and solid support linker chemistries depending on the particular chemical composition of the siNA to be synthesized. Deprotection and purification of the siNA can be performed as is generally described in Deprotection and purification of the siNA can be performed as is generally described in Usman et al., U.S. Pat. No. 5,831,071, U.S. Pat. No. 6,353,098, U.S. Pat. No. 6,437,117, and Bellon et al., U.S. Pat. No. 6,054,576, U.S. Pat. No. 6,162,909, U.S. Pat. No. 6,303,773, or Scaringe supra, incorporated by reference herein in their entireties. Additionally, deprotection conditions can be modified to provide the best possible yield and purity of siNA constructs. For example, applicant has observed that oligonucleotides comprising 2′-deoxy-2′-fluoro nucleotides can degrade under inappropriate deprotection conditions. Such oligonucleotides are deprotected using aqueous methylamine at about 35° C. for 30 minutes. If the 2′-deoxy-2′-fluoro containing oligonucleotide also comprises ribonucleotides, after deprotection with aqueous methylamine at about 35° C. for 30 minutes, TEA-HF is added and the reaction maintained at about 65° C. for an additional 15 minutes.

### Example 6

### RNAi in Vitro Assay to Assess siNA Activity

[0393] An in vitro assay that recapitulates RNAi in a cell-free system is used to evaluate siNA constructs targeting BACE RNA targets. The assay comprises the system described by Tuschl et al., 1999, Genes and Development, 13, 3191-3197 and Zamore et al., 2000, Cell, 101, 25-33 adapted for use with BACE target RNA. A Drosophila extract derived from syncytial blastoderm is used to reconstitute RNAi activity in vitro. Target RNA is generated via in vitro transcription from an appropriate BACE expressing plasmid using T7 RNA polymerase or via chemical synthesis as described herein. Sense and antisense siNA strands (for example 20 uM each) are annealed by incubation in buffer (such as 100 mM potassium acetate, 30 mM HEPES-KOH, pH 7.4, 2 mM magnesium acetate) for 1 minute at 90° C. followed by 1 hour at 37° C., then diluted in lysis buffer (for example 100 mM potassium acetate, 30 mM HEPES-KOH at pH 7.4, 2 mM magnesium acetate). Annealing can be monitored by gel electrophoresis on an agarose gel in TBE buffer and stained with ethidium bromide. The Drosophila lysate is prepared using zero to two-hour-old embryos from Oregon R flies collected on yeasted molasses agar that are dechorionated and lysed. The lysate is centrifuged and the supernatant isolated. The assay comprises a reaction mixture containing 50% lysate [vol/vol], RNA (10-50 pM final concentration), and 10% [vol/vol] lysis buffer containing siNA (10 nM final concentration). The reaction mixture also contains 10 mM creatine phosphate, 10 ug/ml creatine phosphokinase, 100 um GTP, 100 uM UTP, 100 uM CTP, 500 uM ATP, 5 mM DTT, 0.1 U/uL RNasin (Promega), and 100 uM of each amino acid. The final concentration of potassium acetate is adjusted to 100 mM. The reactions are pre-assembled on ice and preincubated at 25° C. for 10 minutes before adding RNA, then incubated at 25° C. for an additional 60 minutes. Reactions are quenched with 4 volumes of 1.25×Passive Lysis Buffer (Promega). Target RNA cleavage is assayed by RT-PCR analysis or other methods known in the art and are compared to control reactions in which siNA is omitted from the reaction.

[0394] Alternately, internally-labeled target RNA for the assay is prepared by in vitro transcription in the presence of [alpha-³²P] CTP, passed over a G50 Sephadex column by spin chromatography and used as target RNA without further purification. Optionally, target RNA is 5′-³²P-end labeled using T4 polynucleotide kinase enzyme. Assays are performed as described above and target RNA and the specific RNA cleavage products generated by RNAi are visualized on an autoradiograph of a gel. The percentage of cleavage is determined by PHOSPHOR IMAGER® (autoradiography) quantitation of bands representing intact control RNA or RNA from control reactions without siNA and the cleavage products generated by the assay.

[0395] In one embodiment, this assay is used to determine target sites in the BACE RNA target for siNA mediated RNAi cleavage, wherein a plurality of siNA constructs are screened for RNAi mediated cleavage of the BACE RNA target, for example, by analyzing the assay reaction by electrophoresis of labeled target RNA, or by northern blotting, as well as by other methodology well known in the art.

### Example 7

### Nucleic Acid Inhibition of BACE Target RNA

[0396] siNA molecules targeted to the human BACE RNA are designed and synthesized as described above. These nucleic acid molecules can be tested for cleavage activity in vivo, for example, using the following procedure. The target sequences and the nucleotide location within the BACE RNA are given in Tables II and III.

[0397] Two formats are used to test the efficacy of siNAs targeting BACE. First, the reagents are tested in cell culture using, for example, cultured A549 cells, 7PA2 cells, Chinese hamster ovary (CHO) cells, APPsw (Swedish type amyloid precursor protein expressing) cells, or SK-N-SH cells, to determine the extent of RNA and protein inhibition. siNA reagents (e.g.; see Tables II and III) are selected against the BACE target as described herein. RNA inhibition is measured after delivery of these reagents by a suitable transfection agent to, for example, A549 cells, 7PA2 cells, CHO cells, APPsw cells, or SK-N-SH cells. Relative amounts of target RNA are measured versus actin using real-time PCR monitoring of amplification (eg., ABI 7700 TAQMAN®). A comparison is made to a mixture of oligonucleotide sequences made to unrelated targets or to a randomized siNA control with the same overall length and chemistry, but randomly substituted at each position. Primary and secondary lead reagents are chosen for the target and optimization performed. After an optimal transfection agent concentration is chosen, a RNA time-course of inhibition is performed with the lead siNA molecule. In addition, a cell-plating format can be used to determine RNA inhibition.

Delivery of siNA to Cells

[0398] Cells (e.g., A549 cells, 7PA2 cells, CHO cells, APPsw cells, or SK-N-SH cells) are seeded, for example, at 1×10⁵ cells per well of a six-well dish in EGM-2 (BioWhittaker) the day before transfection. siNA (final concentration, for example 20 nM) and cationic lipid (e.g., final concentration 2 μg/ml) are complexed in EGM basal media (Bio Whittaker) at 37° C. for 30 minutes in polystyrene tubes. Following vortexing, the complexed siNA is added to each well and incubated for the times indicated. For initial optimization experiments, cells are seeded, for example, at 1×10³ in 96 well plates and siNA complex added as described. Efficiency of delivery of siNA to cells is determined using a fluorescent siNA complexed with lipid. Cells in 6-well dishes are incubated with siNA for 24 hours, rinsed with PBS and fixed in 2% paraformaldehyde for 15 minutes at room temperature. Uptake of siNA is visualized using a fluorescent microscope.

TAQMAN® (Real-Time PCR Monitoring of Amplification) and Lightcycler Quantification of mRNA

[0399] Total RNA is prepared from cells following siNA delivery, for example, using Qiagen RNA purification kits for 6-well or Rneasy extraction kits for 96-well assays. For TAQMAN® analysis (real-time PCR monitoring of amplification), dual-labeled probes are synthesized with the reporter dye, FAM or JOE, covalently linked at the 5′-end and the quencher dye TAMRA conjugated to the 3′-end. One-step RT-PCR amplifications are performed on, for example, an ABI PRISM 7700 Sequence Detector using 50 μl reactions consisting of 10 μl total RNA, 100 nM forward primer, 900 nM reverse primer, 100 nM probe, 1× TaqMan PCR reaction buffer (PE-Applied Biosystems), 5.5 mM MgCl₂, 300 μM each dATP, dCTP, dGTP, and dTTP, 10U RNase Inhibitor (Promega), 1.25U AMPLITAQ GOLD® (DNA polymerase) (PE-Applied Biosystems) and 10U M-MLV Reverse Transcriptase (Promega). The thermal cycling conditions can consist of 30 minutes at 48° C., 10 minutes at 95° C., followed by 40 cycles of 15 seconds at 95° C. and 1 minute at 60° C. Quantitation of mRNA levels is determined relative to standards generated from serially diluted total cellular RNA (300, 100, 33, 11 ng/rxn) and normalizing to β-actin or GAPDH mRNA in parallel TAQMAN® reactions (real-time PCR monitoring of amplification). For each gene of interest an upper and lower primer and a fluorescently labeled probe are designed. Real time incorporation of SYBR Green I dye into a specific PCR product can be measured in glass capillary tubes using a lightcyler. A standard curve is generated for each primer pair using control cRNA. Values are represented as relative expression to GAPDH in each sample.

Western Blotting

[0400] Nuclear extracts can be prepared using a standard micro preparation technique (see for example Andrews and Faller, 1991, Nucleic Acids Research, 19, 2499). Protein extracts from supernatants are prepared, for example using TCA precipitation. An equal volume of 20% TCA is added to the cell supernatant, incubated on ice for 1 hour and pelleted by centrifugation for 5 minutes. Pellets are washed in acetone, dried and resuspended in water. Cellular protein extracts are run on a 10% Bis-Tris NuPage (nuclear extracts) or 4-12% Tris-Glycine (supernatant extracts) polyacrylamide gel and transferred onto nitro-cellulose membranes. Non-specific binding can be blocked by incubation, for example, with 5% non-fat milk for 1 hour followed by primary antibody for 16 hour at 4° C. Following washes, the secondary antibody is applied, for example (1:10,000 dilution) for 1 hour at room temperature and the signal detected with SuperSignal reagent (Pierce).

### Example 8

### Models Useful to Evaluate the Down-Regulation of BACE Gene Expression

Cell Culture

[0401] Vassar et al., 1999, Science, 286, 735-741, describe a cell culture model for studying BACE inhibition. Specific antisense nucleic acid molecules targeting BACE mRNA were used for inhibition studies of endogenous BACE expression in 101 cells and APPsw (Swedish type amyloid precursor protein expressing) cells via lipid mediated transfection. Antisense treatment resulted in dramatic reduction of both BACE mRNA by Northern blot analysis, and APPsβsw (“Swedish” type β-secretase cleavage product) by ELISA, with maximum inhibition of both parameters at 75-80%. This model was also used to study the effect of BACE inhibition on amyloid β-peptide production in APPsw cells. Similarly, such a model can be used to screen siRNA molecules of the instant invention for efficacy and potency.

[0402] In several cell culture systems, cationic lipids have been shown to enhance the bioavailability of oligonucleotides to cells in culture (Bennet, et al., 1992, Mol. Pharmacology, 41, 1023-1033). In one embodiment, siNA molecules of the invention are complexed with cationic lipids for cell culture experiments. siNA and cationic lipid mixtures are prepared in serum-free DMEM immediately prior to addition to the cells. DMEM plus additives are warmed to room temperature (about 20-25° C.) and cationic lipid is added to the final desired concentration and the solution is vortexed briefly. siNA molecules are added to the final desired concentration and the solution is again vortexed briefly and incubated for 10 minutes at room temperature. In dose response experiments, the RNA/lipid complex is serially diluted into DMEM following the 10 minute incubation.

Animal Models

[0403] Evaluating the efficacy of anti-BACE agents in animal models is an important prerequisite to human clinical trials. Games et al., 1995, Nature, 373, 523-527, describe a transgenic mouse model in which mutant human familial type APP (Phe 717 instead of Val) is overexpressed. This model results in mice that progressively develop many of the pathological hallmarks of Alzheimer's disease, and as such, provides a model for testing therapeutic drugs, including siNA constructs of the instant invention.

### Example 9

### RNAi Mediated Inhibition of BACE, APP, PS1 or PS2 Expression in Cell Culture

[0404] Inhibition of BACE, APP, PS1, or PS2 RNA Expression Using siNA Targeting BACE, APP, PS1, or PS2 RNA

[0405] siNA constructs (Table III) are tested for efficacy in reducing BACE, APP, PS1 or PS2 RNA Expression in A549 or SK-N-SH cells. Cells are plated approximately 24 hours before transfection in 96-well plates at 5,000-7,500 cells/well, 100 μl/well, such that at the time of transfection cells are 70-90% confluent. For transfection, annealed siNAs are mixed with the transfection reagent (Lipofectamine 2000, Invitrogen) in a volume of 50 μl/well and incubated for 20 minutes at room temperature. The siNA transfection mixtures are added to cells to give a final siNA concentration of 25 nM in a volume of 150 μl. Each siNA transfection mixture is added to 3 wells for triplicate siNA treatments. Cells are incubated at 37° for 24 hours in the continued presence of the siNA transfection mixture. At 24 hours, RNA is prepared from each well of treated cells. The supernatants with the transfection mixtures are first removed and discarded, then the cells are lysed and RNA prepared from each well. Target gene expression following treatment is evaluated by RT-PCR for the target gene and for a control gene (36B4, an RNA polymerase subunit) for normalization. The triplicate data is averaged and the standard deviations determined for each treatment. Normalized data are graphed and the percent reduction of target mRNA by active siNAs in comparison to their respective inverted control siNAs is determined.

[0406] In a non-limiting example, using the method described above, siNA constructs were screened for activity (see FIG. 22) and compared to untreated cells, scrambled siNA control constructs (Scram1 and Scram2), and cells transfected with lipid alone (transfection control). As shown in FIG. 22, the siNA constructs show significant reduction of BACE RNA expression. Leads generated from such a screen are then further assayed. In a non-limiting example, siNA constructs comprising ribonucleotides and 3′-terminal dithymidine caps are assayed along with a chemically modified siNA construct comprising 2′-deoxy-2′-fluoro pyrimidine nucleotides and purine ribonucleotides, in which the sense strand of the siNA is further modified with 5′ and 3′-terminal inverted deoxyabasic caps and the antisense strand comprises a 3′-terminal phosphorothioate internucleotide linkage. Additional stabilization chemistries as described in Table IV are similarly assayed for activity. These siNA constructs are compared to appropriate matched chemistry inverted controls. In addition, the siNA constructs are also compared to untreated cells, cells transfected with lipid and scrambled siNA constructs, and cells transfected with lipid alone (transfection control).

[0407] Using the method described above, a lead siNA construct (31007/31083) chosen from the screen described in FIG. 22 above was further modified using chemical modifications described in Table IV herein. Results are shown in FIG. 23. A549 cells were transfected with 0.25 ug/well of lipid complexed with 25 nM siNA. Chemically modified constructs having Stab 4/5 chemistry (31378/31381) and Stab 7/11 chemistry (31384/31387) (solid bars; see Table IV) were tested for efficacy compared to matched chemistry inverted controls (open bars; sequences of the siNA constructs shown in Table III). The original lead siNA construct (31007/31083) and the Stab 4/5 and Stab 7/11 constructs were compared to untreated cells, scrambled siNA control constructs (Scram1 and Scram2), and cells transfected with lipid alone (transfection control). As shown in FIG. 23, the original lead construct and the Stab 4/5 and Stab 7/11 modified siNA constructs all show significant reduction of BACE RNA expression.

[0408] FIG. 24 shows a non-limiting example of the reduction of APP mRNA in SK-N-SH cells mediated by siNAs that target APP mRNA. SK-N-SH cells were transfected with 0.25 ug/well of lipid complexed with 25 nM siNA. Active chemically modified siNA constructs (solid bars; see Tables III and IV) were compared to untreated cells, matched chemistry irrelevant siNA control constructs (IC-1), and cells transfected with lipid alone (transfection control). As shown in FIG. 24, the siNA constructs significantly reduce APP RNA expression compared with irrelevant siNA control and transfection control constructs.

[0409] FIG. 25 shows a non-limiting example of the reduction of PSEN1 mRNA in SK-N-SH cells mediated by siNAs that target PSEN1 mRNA. SK-N-SH cells were transfected with 0.25 ug/well of lipid complexed with 25 nM siNA. Active chemically modified siNA constructs (solid bars; see Tables III and IV) were compared to untreated cells, matched chemistry irrelevant siNA control constructs (IC-1), and cells transfected with lipid alone (transfection control). As shown in FIG. 25, the siNA constructs significantly reduce PSEN1 RNA expression compared with irrelevant siNA control and transfection control constructs.

[0410] FIG. 26 shows a non-limiting example of the reduction of PSEN2 mRNA in SK-N-SH cells mediated by siNAs that target PSEN2 mRNA. SK-N-SH cells were transfected with 0.25 ug/well of lipid complexed with 25 nM siNA. Active chemically modified siNA constructs (solid bars; see Tables III and IV) were compared to untreated cells, matched chemistry irrelevant siNA control constructs (IC-1), and cells transfected with lipid alone (transfection control). As shown in FIG. 26, the siNA constructs significantly reduce PSEN2 RNA expression compared with irrelevant siNA control and transfection control constructs.

### Example 10

### Indications

[0411] Particular degenerative and disease states that can be associated with BACE, APP, PIN-1, PS-1 and/or PS-2 expression modulation include but are not limited to: Alzheimer's disease, dementia, stroke (CVA) and any other diseases or conditions that are related to the levels of BACE, APP, PIN-1, PS-1 and/or PS-2 in a cell or tissue, alone or in combination with other therapies. The reduction of BACE, APP, PIN-1, PS-1 and/or PS-2 expression (specifically BACE, APP, PIN-1, PS-1 and/or PS-2 RNA levels) and thus reduction in the level of the respective protein relieves, to some extent, the symptoms of the disease or condition.

[0412] Those skilled in the art will recognize that other drug compounds and therapies may be readily combined with or used in conjuction with the nucleic acid molecules of the instant invention (e.g., siNA molecules) are hence within the scope of the instant invention.

### Example 11

### Diagnostic Uses

[0413] The siNA molecules of the invention can be used in a variety of diagnostic applications, such as in the identification of molecular targets (e.g., RNA) in a variety of applications, for example, in clinical, industrial, environmental, agricultural and/or research settings. Such diagnostic use of siNA molecules involves utilizing reconstituted RNAi systems, for example, using cellular lysates or partially purified cellular lysates. siNA molecules of this invention can be used as diagnostic tools to examine genetic drift and mutations within diseased cells or to detect the presence of endogenous or exogenous, for example viral, RNA in a cell. The close relationship between siNA activity and the structure of the target RNA allows the detection of mutations in any region of the molecule, which alters the base-pairing and three-dimensional structure of the target RNA. By using multiple siNA molecules described in this invention, one can map nucleotide changes, which are important to RNA structure and function in vitro, as well as in cells and tissues. Cleavage of target RNAs with siNA molecules can be used to inhibit gene expression and define the role of specified gene products in the progression of disease or infection. In this manner, other genetic targets can be defined as important mediators of the disease. These experiments will lead to better treatment of the disease progression by affording the possibility of combination therapies (e.g., multiple siNA molecules targeted to different genes, siNA molecules coupled with known small molecule inhibitors, or intermittent treatment with combinations siNA molecules and/or other chemical or biological molecules). Other in vitro uses of siNA molecules of this invention are well known in the art, and include detection of the presence of mRNAs associated with a disease, infection, or related condition. Such RNA is detected by determining the presence of a cleavage product after treatment with a siNA using standard methodologies, for example, fluorescence resonance emission transfer (FRET).

[0414] In a specific example, siNA molecules that cleave only wild-type or mutant forms of the target RNA are used for the assay. The first siNA molecules (i.e., those that cleave only wild-type forms of target RNA) are used to identify wild-type RNA present in the sample and the second siNA molecules (i.e., those that cleave only mutant forms of target RNA) are used to identify mutant RNA in the sample. As reaction controls, synthetic substrates of both wild-type and mutant RNA are cleaved by both siNA molecules to demonstrate the relative siNA efficiencies in the reactions and the absence of cleavage of the “non-targeted” RNA species. The cleavage products from the synthetic substrates also serve to generate size markers for the analysis of wild-type and mutant RNAs in the sample population. Thus, each analysis requires two siNA molecules, two substrates and one unknown sample, which is combined into six reactions. The presence of cleavage products is determined using an RNase protection assay so that full-length and cleavage fragments of each RNA can be analyzed in one lane of a polyacrylamide gel. It is not absolutely required to quantify the results to gain insight into the expression of mutant RNAs and putative risk of the desired phenotypic changes in target cells. The expression of mRNA whose protein product is implicated in the development of the phenotype (i.e., disease related or infection related) is adequate to establish risk. If probes of comparable specific activity are used for both transcripts, then a qualitative comparison of RNA levels is adequate and decreases the cost of the initial diagnosis. Higher mutant form to wild-type ratios are correlated with higher risk whether RNA levels are compared qualitatively or quantitatively.

[0415] All patents and publications mentioned in the specification are indicative of the levels of skill of those skilled in the art to which the invention pertains. All references cited in this disclosure are incorporated by reference to the same extent as if each reference had been incorporated by reference in its entirety individually.

[0416] One skilled in the art would readily appreciate that the present invention is well adapted to carry out the objects and obtain the ends and advantages mentioned, as well as those inherent therein. The methods and compositions described herein as presently representative of preferred embodiments are exemplary and are not intended as limitations on the scope of the invention. Changes therein and other uses will occur to those skilled in the art, which are encompassed within the spirit of the invention, are defined by the scope of the claims.

[0417] It will be readily apparent to one skilled in the art that varying substitutions and modifications can be made to the invention disclosed herein without departing from the scope and spirit of the invention. Thus, such additional embodiments are within the scope of the present invention and the following claims. The present invention teaches one skilled in the art to test various combinations and/or substitutions of chemical modifications described herein toward generating nucleic acid constructs with improved activity for mediating RNAi activity. Such improved activity can comprise improved stability, improved bioavailability, and/or improved activation of cellular responses mediating RNAi. Therefore, the specific embodiments described herein are not limiting and one skilled in the art can readily appreciate that specific combinations of the modifications described herein can be tested without undue experimentation toward identifying siNA molecules with improved RNAi activity.

[0418] The invention illustratively described herein suitably can be practiced in the absence of any element or elements, limitation or limitations that are not specifically disclosed herein. Thus, for example, in each instance herein any of the terms “comprising”, “consisting essentially of”, and “consisting of” may be replaced with either of the other two terms. The terms and expressions which have been employed are used as terms of description and not of limitation, and there is no intention that in the use of such terms and expressions of excluding any equivalents of the features shown and described or portions thereof, but it is recognized that various modifications are possible within the scope of the invention claimed. Thus, it should be understood that although the present invention has been specifically disclosed by preferred embodiments, optional features, modification and variation of the concepts herein disclosed may be resorted to by those skilled in the art, and that such modifications and variations are considered to be within the scope of this invention as defined by the description and the appended claims.

[0419] In addition, where features or aspects of the invention are described in terms of Markush groups or other grouping of alternatives, those skilled in the art will recognize that the invention is also thereby described in terms of any individual member or subgroup of members of the Markush group or other group.

TABLE I
Accession Numbers

NM_012104
Homo sapiens beta-site APP-cleaving enzyme (BACE),
transcript variant a, mRNA
gi|21040369|ref|NM_012104.2|[21040369]
NM_006222
Homo sapiens protein (peptidyl-prolyl cis/trans
isomerase) NIMA-interacting
1-like (PIN1L), mRNA
gi|5453899|ref|NM_006222.1|[5453899]
L76517
Homo sapiens (clone cc44) senilin 1 (PS1; S182) mRNA,
complete cds
gi|1479973|gb|L76517.1|HUMPS1MRNA[1479973]
L43964
Homo sapiens (clone F-T03796) STM-2 mRNA, complete cds
gi|951202|gb|L43964.1|HUMSTM2R[951202]
NM_138973
Homo sapiens beta-site APP-cleaving enzyme (BACE),
transcript variant d, mRNA
gi|21040367|ref|NM_138973.1|[21040367]
NM_138972
Homo sapiens beta-site APP-cleaving enzyme (BACE),
transcript variant b, mRNA
gi|21040365|ref|NM_138972.1|[21040365]
NM_138971
Homo sapiens beta-site APP-cleaving enzyme (BACE),
transcript variant c, mRNA
gi|21040363|ref|NM_138971.1|[21040363]
Homo sapiens cDNA FLJ90568 fis, clone OVARC1001570,
highly similar to Homo
sapiens beta-site APP cleaving enzyme (BACE) mRNA
gi|22760888|dbj|AK075049.1|[22760888]
AF527782
Homo sapiens beta-site APP-cleaving enzyme (BACE)
mRNA, partial cds,
alternatively spliced
gi|22094870|gb|AF527782.1|[22094870]
AF324837
Homo sapiens beta-site APP cleaving enzyme mRNA,
partial cds, alternativelyspliced
gi|21449275|gb|AF324837.1|[21449275]
AF338817
Homo sapiens beta-site APP cleaving enzyme type C
mRNA, complete cds
gi|13699247|gb|AF338817.1|[13699247]
AF338816
Homo sapiens beta-site APP cleaving enzyme type B
mRNA, complete cds
gi|13699245|gb|AF338816.1|[13699245]
AB050438
Homo sapiens BACE mRNA for beta-site APP cleaving
enzyme I-432, complete cds
gi|13568410|dbj|AB050438.1|[13568410]
AB050437
Homo sapiens BACE mRNA for beta-site APP cleaving
enzyme I-457, complete cds
gi|13568408|dbj|AB050437.1|[13568408]
AB050436
Homo sapiens BACE mRNA for beta-site APP cleaving
enzyme I-476, complete cds
gi|13568406|dbj|AB050436.1|[13568406]
AF190725
Homo sapiens beta-site APP cleaving enzyme (BACE)
mRNA, complete cds
gi|6118538|gb|AF190725.1|AF190725[6118538]
NM_007319
Homo sapiens presenilin 1 (Alzheimer disease 3)
(PSEN1), transcript variant I-374., mRNA
gi|7549814|ref|NM_007319.1|[7549814]
NM_138992
Homo sapiens beta-site APP-cleaving enzyme 2 (BACE2),
transcript variant b, mRNA
gi|21040361|ref|NM_138992.1|[21040361]
NM_138991
Homo sapiens beta-site APP-cleaving enzyme 2 (BACE2),
transcript variant c, mRNA
gi|21040359|ref|NM_138991.1|[21040359]
NM_012105
Homo sapiens beta-site APP-cleaving enzyme 2 (BACE2),
transcript variant a, mRNA
gi|21040358|ref|NM_012105.3|[21040358]
AB066441
Homo sapiens APP mRNA for amyloid precursor protein,
partial cds, D678N mutant
gi|16904654|dbj|ABO66441.1|[16904654]
AB050438
Homo sapiens BACE mRNA for beta-site APP cleaving
enzyme I-432, complete cds
gi|13568410|dbj|AB050438.1|[13568410]
AB050437
Homo sapiens BACE mRNA for beta-site APP cleaving
enzyme I-457, complete cds
gi|13568408|dbj|AB050437.1|[13568408]
AB050436
Homo sapiens BACE mRNA for beta-site APP cleaving
enzyme I-476, complete cds
gi|13568406|dbj|AB050436.1|[13568406]
NM_012486
Homo sapiens presenilin 2 (Alzheimer disease 4)
(PSEN2), transcript variant 2, mRNA
gi|7108359|ref|NM_012486.1|[7108359]
NM_000447
Homo sapiens presenilin 2 (Alzheimer disease 4)
(PSEN2), transcript variant 1, mRNA
gi|4506164|ref|NM_000447.1|[4506164]
AF188277
Homo sapiens aspartyl protease (BACE2) mRNA, complete
cds, alternatively spliced
gi|7025334|gb|AF188277.1|AF188277[7025334]
AF188276
Homo sapiens aspartyl protease (BACE2) mRNA, complete
cds, alternatively spliced
gi|7025332|gb|AF188276.1|AF188276[7025332]
AF178532
Homo sapiens aspartyl protease (BACE2) mRNA, complete
cds
gi|6851265|gb|AF178532.1|AF178532[6851265]
D87675
Homo sapiens DNA for amyloid precursor protein,
complete cds
gi|2429080|dbj|D87675.1|[2429080]
AF201468
Homo sapiens APP beta-secretase mRNA, complete cds
gi|6601444|gb|AF201468.1|AF201468[6601444]
AF190725
Homo sapiens beta-site APP cleaving enzyme (BACE)
mRNA, complete cds
gi|6118538|gb|AF190725.1|AF190725[6118538]
E14707
DNA encoding a mutated amyloid precursor protein
gi|5709390|dbj|E14707.11||pat|JP|1998001499|1[5709390]
AF168956
Homo sapiens amyloid precursor protein homolog HSD-2
mRNA, complete cds
gi|5702387|gb|AF168956.1|AF168956[5702387]
S60099
APPH = amyloid precursor protein homolog [human,
placenta, mRNA, 3727 nt]
gi|300168|bbm|300685|bbs|131198|gb|S60099.1|S60099[300168]
U50939
Human amyloid precursor protein-binding protein 1
mRNA, complete cds
gi|1314559|gb|U50939.1|HSU50939[1314559]
NM_000484
Homo sapiens amyloid beta (A4) precursor protein
(protease nexin-II, Alzheimer
disease) (APP), transcript variant 1, mRNA
gi|41406053|ref|NM_000484.2|[41406053]
BC018937
Homo sapiens amyloid beta (A4) precursor protein
(protease nexin-II, Alzheimer
disease), mRNA (cDNA clone IMAGE: 4126584)
gi|39645179|gb|BC018937.2|[39645179]
NM_201413
Homo sapiens amyloid beta (A4) precursor protein
(protease nexin-II, Alzheimer
disease) (APP), transcript variant 2, mRNA
gi|41406054|ref|NM_201413.1|[41406054]
NM_201414
Homo sapiens amyloid beta (A4) precursor protein
(protease nexin-II, Alzheimer
disease) (APP), transcript variant 3, mRNA
gi|41406056|ref|NM_201414.1|[41406056]
BC065529
Homo sapiens amyloid beta (A4) precursor protein
(protease nexin-II, Alzheimer
disease), transcript variant 2, mRNA (cDNA clone
MGC: 75167 IMAGE: 6152423),
complete cds
gi|41350938|gb|BC065529.1|[41350938]
Y00264
Human mRNA for amyloid A4 precursor of Alzheimer's
disease
gi|28525|emb|Y00264.1|HSAFPA4[28525]
AF282245
Homo sapiens amyloid precursor protein 639 (APP639)
mRNA, complete cds
gi|33339673|gb|AF282245.1|[33339673]
X06989
Homo sapiens mRNA for amyloid A4 protein (APP gene)
gi|28720|emb|X06989.1|HSAPA4R[28720]

[0420] TABLE II
APP, BACE, PSEN1, PSEN2 siNA AND TARGET SEQUENCES

APP NM_000484

| | | |
|---|---|---|
| Seq | Seq | Seq |

| | | | | | | | | |
|---|---|---|---|---|---|---|---|---|
| Pos | Seq | ID | UPos | Upper seq | ID | LPos | Lower seq | ID |

| | | | | | | | | |
|---|---|---|---|---|---|---|---|---|
| 3 | UUUCCUCGGCAGCGGUAGG | 1 | 3 | UUUCCUCGGCAGCGGUAGG | 1 | 21 | CCUACCGCUGCCGAGGAAA | 200 |
| 21 | GCGAGAGCACGCGGAGGAG | 2 | 21 | GCGAGAGCACGCGGAGGAG | 2 | 39 | CUCCUCCGCGUGCUCUCGC | 201 |
| 39 | GCGUGCGCGGGGGCCCCGG | 3 | 39 | GCGUGCGCGGGGGCCCCGG | 3 | 57 | CCGGGGCCCCCGCGCACGC | 202 |
| 57 | GGAGACGGCGGCGGUGGCG | 4 | 57 | GGAGACGGCGGCGGUGGCG | 4 | 75 | CGCCACCGCCGCCGUCUCC | 203 |
| 75 | GGCGCGGGCAGAGCAAGGA | 5 | 75 | GGCGCGGGCAGAGCAAGGA | 5 | 93 | UCCUUGCUCUGCCCGCGCC | 204 |
| 93 | ACGCGGCGGAUCCCACUCG | 6 | 93 | ACGCGGCGGAUCCCACUCG | 6 | 111 | CGAGUGGGAUCCGCCGCGU | 205 |
| 111 | GCACAGCAGCGCACUCGGU | 7 | 111 | GCACAGCAGCGCACUCGGU | 7 | 129 | ACCGAGUGCGCUGCUGUGC | 206 |
| 129 | UGCCCCGCGCAGGGUCGCG | 8 | 129 | UGCCCCGCGCAGGGUCGCG | 8 | 147 | CGCGACCCUGCGCGGGGCA | 207 |
| 147 | GAUGCUGCCCGGUUUGGCA | 9 | 147 | GAUGCUGCCCGGUUUGGCA | 9 | 165 | UGCCAAACCGGGCAGCAUC | 208 |
| 165 | ACUGCUCCUGCUGGCCGCC | 10 | 165 | ACUGCUCCUGCUGGCCGCC | 10 | 183 | GGCGGCCAGCAGGAGCAGU | 209 |
| 183 | CUGGACGGCUCGGGCGCUG | 11 | 183 | CUGGACGGCUCGGGCGCUG | 11 | 201 | CAGCGCCCGAGCCGUCCAG | 210 |
| 201 | GGAGGUACCCACUGAUGGU | 12 | 201 | GGAGGUACCCACUGAUGGU | 12 | 219 | ACCAUCAGUGGGUACCUCC | 211 |
| 219 | UAAUGCUGGCCUGCUGGCU | 13 | 219 | UAAUGCUGGCCUGCUGGCU | 13 | 237 | AGCCAGCAGGCCAGCAUUA | 212 |
| 237 | UGAACCCCAGAUUGCCAUG | 14 | 237 | UGAACCCCAGAUUGCCAUG | 14 | 255 | CAUGGCAAUCUGGGGUUCA | 213 |
| 255 | GUUCUGUGGCAGACUGAAC | 15 | 255 | GUUCUGUGGCAGACUGAAC | 15 | 273 | GUUCAGUCUGCCACAGAAC | 214 |
| 273 | CAUGCACAUGAAUGUCCAG | 16 | 273 | CAUGCACAUGAAUGUCCAG | 16 | 291 | CUGGACAUUCAUGUGCAUG | 215 |
| 291 | GAAUGGGAAGUGGGAUUCA | 17 | 291 | GAAUGGGAAGUGGGAUUCA | 17 | 309 | UGAAUCCCACUUCCCAUUC | 216 |
| 309 | AGAUCCAUCAGGGACCAAA | 18 | 309 | AGAUCCAUCAGGGACCAAA | 18 | 327 | UUUGGUCCCUGAUGGAUCU | 217 |
| 327 | AACCUGCAUUGAUACCAAG | 19 | 327 | AACCUGCAUUGAUACCAAG | 19 | 345 | CUUGGUAUCAAUGCAGGUU | 218 |
| 345 | GGAAGGCAUCCUGCAGUAU | 20 | 345 | GGAAGGCAUCCUGCAGUAU | 20 | 363 | AUACUGCAGGAUGCCUUCC | 219 |
| 363 | UUGCCAAGAAGUCUACCCU | 21 | 363 | UUGCCAAGAAGUCUACCCU | 21 | 381 | AGGGUAGACUUCUUGGCAA | 220 |
| 381 | UGAACUGCAGAUCACCAAU | 22 | 381 | UGAACUGCAGAUCACCAAU | 22 | 399 | AUUGGUGAUCUGCAGUUCA | 221 |
| 399 | UGUGGUAGAAGCCAACCAA | 23 | 399 | UGUGGUAGAAGCCAACCAA | 23 | 417 | UUGGUUGGCUUCUACCACA | 222 |
| 417 | ACCAGUGACCAUCCAGAAC | 24 | 417 | ACCAGUGACCAUCCAGAAC | 24 | 435 | GUUCUGGAUGGUCACUGGU | 223 |
| 435 | CUGGUGCAAGCGGGGCCGC | 25 | 435 | CUGGUGCAAGCGGGGCCGC | 25 | 453 | GCGGCCCCGCUUGCACCAG | 224 |
| 453 | CAAGCAGUGCAAGACCCAU | 26 | 453 | CAAGCAGUGCAAGACCCAU | 26 | 471 | AUGGGUCUUGCACUGCUUG | 225 |
| 471 | UCCCCACUUUGUGAUUCCC | 27 | 471 | UCCCCACUUUGUGAUUCCC | 27 | 489 | GGGAAUCACAAAGUGGGGA | 226 |
| 489 | CUACCGCUGCUUAGUUGGU | 28 | 489 | CUACCGCUGCUUAGUUGGU | 28 | 507 | ACCAACUAAGCAGCGGUAG | 227 |
| 507 | UGAGUUUGUAAGUGAUGCC | 29 | 507 | UGAGUUUGUAAGUGAUGCC | 29 | 525 | GGCAUCACUUACAAACUCA | 228 |
| 525 | CCUUCUCGUUCCUGACAAG | 30 | 525 | CCUUCUCGUUCCUGACAAG | 30 | 543 | CUUGUCAGGAACGAGAAGG | 229 |
| 543 | GUGCAAAUUCUUACACCAG | 31 | 543 | GUGCAAAUUCUUACACCAG | 31 | 561 | CUGGUGUAAGAAUUUGCAC | 230 |
| 561 | GGAGAGGAUGGAUGUUUGC | 32 | 561 | GGAGAGGAUGGAUGUUUGC | 32 | 579 | GCAAACAUCCAUCCUCUCC | 231 |
| 579 | CGAAACUCAUCUUCACUGG | 33 | 579 | CGAAACUCAUCUUCACUGG | 33 | 597 | CCAGUGAAGAUGAGUUUCG | 232 |
| 597 | GCACACCGUCGCCAAAGAG | 34 | 597 | GCACACCGUCGCCAAAGAG | 34 | 615 | CUCUUUGGCGACGGUGUGC | 233 |
| 615 | GACAUGCAGUGAGAAGAGU | 35 | 615 | GACAUGCAGUGAGAAGAGU | 35 | 633 | ACUCUUCUCACUGCAUGUC | 234 |
| 633 | UACCAACUUGCAUGACUAC | 36 | 633 | UACCAACUUGCAUGACUAC | 36 | 651 | GUAGUCAUGCAAGUUGGUA | 235 |
| 651 | CGGCAUGUUGCUGCCCUGC | 37 | 651 | CGGCAUGUUGCUGCCCUGC | 37 | 669 | GCAGGGCAGCAACAUGCCG | 236 |
| 669 | CGGAAUUGACAAGUUCCGA | 38 | 669 | CGGAAUUGACAAGUUCCGA | 38 | 687 | UCGGAACUUGUCAAUUCCG | 237 |
| 687 | AGGGGUAGAGUUUGUGUGU | 39 | 687 | AGGGGUAGAGUUUGUGUGU | 39 | 705 | ACACACAAACUCUACCCCU | 238 |
| 705 | UUGCCCACUGGCUGAAGAA | 40 | 705 | UUGCCCACUGGCUGAAGAA | 40 | 723 | UUCUUCAGCCAGUGGGCAA | 239 |
| 723 | AAGUGACAAUGUGGAUUCU | 41 | 723 | AAGUGACAAUGUGGAUUCU | 41 | 741 | AGAAUCCACAUUGUCACUU | 240 |
| 741 | UGCUGAUGCGGAGGAGGAU | 42 | 741 | UGCUGAUGCGGAGGAGGAU | 42 | 759 | AUCCUCCUCCGCAUCAGCA | 241 |
| 759 | UGACUCGGAUGUCUGGUGG | 43 | 759 | UGACUCGGAUGUCUGGUGG | 43 | 777 | CCACCAGACAUCCGAGUCA | 242 |
| 777 | GGGCGGAGCAGACACAGAC | 44 | 777 | GGGCGGAGCAGACACAGAC | 44 | 795 | GUCUGUGUCUGCUCCGCCC | 243 |
| 795 | CUAUGCAGAUGGGAGUGAA | 45 | 795 | CUAUGCAGAUGGGAGUGAA | 45 | 813 | UUCACUCCCAUCUGCAUAG | 244 |
| 813 | AGACAAAGUAGUAGAAGUA | 46 | 813 | AGACAAAGUAGUAGAAGUA | 46 | 831 | UACUUCUACUACUUUGUCU | 245 |
| 831 | AGCAGAGGAGGAAGAAGUG | 47 | 831 | AGCAGAGGAGGAAGAAGUG | 47 | 849 | CACUUCUUCCUCCUCUGCU | 246 |
| 849 | GGCUGAGGUGGAAGAAGAA | 48 | 849 | GGCUGAGGUGGAAGAAGAA | 48 | 867 | UUCUUCUUCCACCUCAGCC | 247 |
| 867 | AGAAGCCGAUGAUGACGAG | 49 | 867 | AGAAGCCGAUGAUGACGAG | 49 | 885 | CUCGUCAUCAUCGGCUUCU | 248 |
| 885 | GGACGAUGAGGAUGGUGAU | 50 | 885 | GGACGAUGAGGAUGGUGAU | 50 | 903 | AUCACCAUCCUCAUCGUCC | 249 |
| 903 | UGAGGUAGAGGAAGAGGCU | 51 | 903 | UGAGGUAGAGGAAGAGGCU | 51 | 921 | AGCCUCUUCCUCUACCUCA | 250 |
| 921 | UGAGGAACCCUACGAAGAA | 52 | 921 | UGAGGAACCCUACGAAGAA | 52 | 939 | UUCUUCGUAGGGUUCCUCA | 251 |
| 939 | AGCCACAGAGAGAACCACC | 53 | 939 | AGCCACAGAGAGAACCACC | 53 | 957 | GGUGGUUCUCUCUGUGGCU | 252 |
| 957 | CAGCAUUGCCACCACCACC | 54 | 957 | CAGCAUUGCCACCACCACC | 54 | 975 | GGUGGUGGUGGCAAUGCUG | 253 |
| 975 | CACCACCACCACAGAGUCU | 55 | 975 | CACCACCACCACAGAGUCU | 55 | 993 | AGACUCUGUGGUGGUGGUG | 254 |
| 993 | UGUGGAAGAGGUGGUUCGA | 56 | 993 | UGUGGAAGAGGUGGUUCGA | 56 | 1011 | UCGAACCACCUCUUCCACA | 255 |
| 1011 | AGAGGUGUGCUCUGAACAA | 57 | 1011 | AGAGGUGUGCUCUGAACAA | 57 | 1029 | UUGUUCAGAGCACACCUCU | 256 |
| 1029 | AGCCGAGACGGGGCCGUGC | 58 | 1029 | AGCCGAGACGGGGCCGUGC | 58 | 1047 | GCACGGCCCCGUCUCGGCU | 257 |
| 1047 | CCGAGCAAUGAUCUCCCGC | 59 | 1047 | CCGAGCAAUGAUCUCCCGC | 59 | 1065 | GCGGGAGAUCAUUGCUCGG | 258 |
| 1065 | CUGGUACUUUGAUGUGACU | 60 | 1065 | CUGGUACUUUGAUGUGACU | 60 | 1083 | AGUCACAUCAAAGUACCAG | 259 |
| 1083 | UGAAGGGAAGUGUGCCCCA | 61 | 1083 | UGAAGGGAAGUGUGCCCCA | 61 | 1101 | UGGGGCACACUUCCCUUCA | 260 |
| 1101 | AUUCUUUUACGGCGGAUGU | 62 | 1101 | AUUCUUUUACGGCGGAUGU | 62 | 1119 | ACAUCCGCCGUAAAAGAAU | 261 |
| 1119 | UGGCGGCAACCGGAACAAC | 63 | 1119 | UGGCGGCAACCGGAACAAC | 63 | 1137 | GUUGUUCCGGUUGCCGCCA | 262 |
| 1137 | CUUUGACACAGAAGAGUAC | 64 | 1137 | CUUUGACACAGAAGAGUAC | 64 | 1155 | GUACUCUUCUGUGUCAAAG | 263 |
| 1155 | CUGCAUGGCCGUGUGUGGC | 65 | 1155 | CUGCAUGGCCGUGUGUGGC | 65 | 1173 | GCCACACACGGCCAUGCAG | 264 |
| 1173 | CAGCGCCAUGUCCCAAAGU | 66 | 1173 | CAGCGCCAUGUCCCAAAGU | 66 | 1191 | ACUUUGGGACAUGGCGCUG | 265 |
| 1191 | UUUACUCAAGACUACCCAG | 67 | 1191 | UUUACUCAAGACUACCCAG | 67 | 1209 | CUGGGUAGUCUUGAGUAAA | 266 |
| 1209 | GGAACCUCUUGCCCGAGAU | 68 | 1209 | GGAACCUCUUGCCCGAGAU | 68 | 1227 | AUCUCGGGCAAGAGGUUCC | 267 |
| 1227 | UCCUGUUAAACUUCCUACA | 69 | 1227 | UCCUGUUAAACUUCCUACA | 69 | 1245 | UGUAGGAAGUUUAACAGGA | 268 |
| 1245 | AACAGCAGCCAGUACCCCU | 70 | 1245 | AACAGCAGCCAGUACCCCU | 70 | 1263 | AGGGGUACUGGCUGCUGUU | 269 |
| 1263 | UGAUGCCGUUGACAAGUAU | 71 | 1263 | UGAUGCCGUUGACAAGUAU | 71 | 1281 | AUACUUGUCAACGGCAUCA | 270 |
| 1281 | UCUCGAGACACCUGGGGAU | 72 | 1281 | UCUCGAGACACCUGGGGAU | 72 | 1299 | AUCCCCAGGUGUCUCGAGA | 271 |
| 1299 | UGAGAAUGAACAUGCCCAU | 73 | 1299 | UGAGAAUGAACAUGCCCAU | 73 | 1317 | AUGGGCAUGUUCAUUCUCA | 272 |
| 1317 | UUUCCAGAAAGCCAAAGAG | 74 | 1317 | UUUCCAGAAAGCCAAAGAG | 74 | 1335 | CUCUUUGGCUUUCUGGAAA | 273 |
| 1335 | GAGGCUUGAGGCCAAGCAC | 75 | 1335 | GAGGCUUGAGGCCAAGCAC | 75 | 1353 | GUGCUUGGCCUCAAGCCUC | 274 |
| 1353 | CCGAGAGAGAAUGUCCCAG | 76 | 1353 | CCGAGAGAGAAUGUCCCAG | 76 | 1371 | CUGGGACAUUCUCUCUCGG | 275 |
| 1371 | GGUCAUGAGAGAAUGGGAA | 77 | 1371 | GGUCAUGAGAGAAUGGGAA | 77 | 1389 | UUCCCAUUCUCUCAUGACC | 276 |
| 1389 | AGAGGCAGAACGUCAAGCA | 78 | 1389 | AGAGGCAGAACGUCAAGCA | 78 | 1407 | UGCUUGACGUUCUGCCUCU | 277 |
| 1407 | AAAGAACUUGCCUAAAGCU | 79 | 1407 | AAAGAACUUGCCUAAAGCU | 79 | 1425 | AGCUUUAGGCAAGUUCUUU | 278 |
| 1425 | UGAUAAGAAGGCAGUUAUC | 80 | 1425 | UGAUAAGAAGGCAGUUAUC | 80 | 1443 | GAUAACUGCCUUCUUAUCA | 279 |
| 1443 | CCAGCAUUUCCAGGAGAAA | 81 | 1443 | CCAGCAUUUCCAGGAGAAA | 81 | 1461 | UUUCUCCUGGAAAUGCUGG | 280 |
| 1461 | AGUGGAAUCUUUGGAACAG | 82 | 1461 | AGUGGAAUCUUUGGAACAG | 82 | 1479 | CUGUUCCAAAGAUUCCACU | 281 |
| 1479 | GGAAGCAGCCAACGAGAGA | 83 | 1479 | GGAAGCAGCCAACGAGAGA | 83 | 1497 | UCUCUCGUUGGCUGCUUCC | 282 |
| 1497 | ACAGCAGCUGGUGGAGACA | 84 | 1497 | ACAGGAGGUGGUGGAGACA | 84 | 1515 | UGUCUCCACCAGCUGCUGU | 283 |
| 1515 | ACACAUGGCCAGAGUGGAA | 85 | 1515 | ACACAUGGCCAGAGUGGAA | 85 | 1533 | UUCCACUCUGGCCAUGUGU | 284 |
| 1533 | AGCCAUGCUCAAUGACCGC | 86 | 1533 | AGCCAUGCUCAAUGACCGC | 86 | 1551 | GCGGUCAUUGAGCAUGGCU | 285 |
| 1551 | CCGCCGCCUGGCCCUGGAG | 87 | 1551 | CCGCCGCCUGGCCCUGGAG | 87 | 1569 | CUCCAGGGCCAGGCGGCGG | 286 |
| 1569 | GAACUACAUCACCGCUCUG | 88 | 1569 | GAACUACAUCACCGCUCUG | 88 | 1587 | CAGAGCGGUGAUGUAGUUC | 287 |
| 1587 | GCAGGCUGUUCCUCCUCGG | 89 | 1587 | GCAGGCUGUUCCUCCUCGG | 89 | 1605 | CCGAGGAGGAACAGCCUGC | 288 |
| 1605 | GCCUCGUCACGUGUUCAAU | 90 | 1605 | GCCUCGUCACGUGUUCAAU | 90 | 1623 | AUUGAACACGUGACGAGGC | 289 |
| 1623 | UAUGCUAAAGAAGUAUGUC | 91 | 1623 | UAUGCUAAAGAAGUAUGUC | 91 | 1641 | GACAUACUUCUUUAGCAUA | 290 |
| 1641 | CCGCGCAGAACAGAAGGAC | 92 | 1641 | CCGCGCAGAACAGAAGGAC | 92 | 1659 | GUCCUUCUGUUCUGCGCGG | 291 |
| 1659 | CAGACAGCACACCCUAAAG | 93 | 1659 | CAGACAGCACACCCUAAAG | 93 | 1677 | CUUUAGGGUGUGCUGUCUG | 292 |
| 1677 | GCAUUUCGAGCAUGUGCGC | 94 | 1677 | GCAUUUCGAGCAUGUGCGC | 94 | 1695 | GCGCACAUGCUCGAAAUGC | 293 |
| 1695 | CAUGGUGGAUCCCAAGAAA | 95 | 1695 | CAUGGUGGAUCCCAAGAAA | 95 | 1713 | UUUCUUGGGAUCCACCAUG | 294 |
| 1713 | AGCCGCUCAGAUCCGGUCC | 96 | 1713 | AGCCGCUCAGAUCCGGUCC | 96 | 1731 | GGACCGGAUCUGAGCGGCU | 295 |
| 1731 | CCAGGUUAUGACACACCUC | 97 | 1731 | CCAGGUUAUGACACACCUC | 97 | 1749 | GAGGUGUGUCAUAACCUGG | 296 |
| 1749 | CCGUGUGAUUUAUGAGCGC | 98 | 1749 | CCGUGUGAUUUAUGAGCGC | 98 | 1767 | GCGCUCAUAAAUCACACGG | 297 |
| 1767 | CAUGAAUCAGUCUCUCUCC | 99 | 1767 | CAUGAAUCAGUCUCUCUCC | 99 | 1785 | GGAGAGAGACUGAUUCAUG | 298 |
| 1785 | CCUGCUCUACAACGUGCCU | 100 | 1785 | CCUGCUCUACAACGUGCCU | 100 | 1803 | AGGCACGUUGUAGAGCAGG | 299 |
| 1803 | UGCAGUGGCCGAGGAGAUU | 101 | 1803 | UGCAGUGGCCGAGGAGAUU | 101 | 1821 | AAUCUCCUCGGCCACUGCA | 300 |
| 1821 | UCAGGAUGAAGUUGAUGAG | 102 | 1821 | UCAGGAUGAAGUUGAUGAG | 102 | 1839 | CUCAUCAACUUCAUCCUGA | 301 |
| 1839 | GCUGCUUCAGAAAGAGCAA | 103 | 1839 | GCUGCUUCAGAAAGAGCAA | 103 | 1857 | UUGCUCUUUCUGAAGCAGC | 302 |
| 1857 | AAACUAUUCAGAUGACGUC | 104 | 1857 | AAACUAUUCAGAUGACGUC | 104 | 1875 | GACGUCAUCUGAAUAGUUU | 303 |
| 1875 | CUUGGCCAACAUGAUUAGU | 105 | 1875 | CUUGGCCAACAUGAUUAGU | 105 | 1893 | ACUAAUCAUGUUGGCCAAG | 304 |
| 1893 | UGAACCAAGGAUCAGUUAC | 106 | 1893 | UGAACCAAGGAUCAGUUAC | 106 | 1911 | GUAACUGAUCCUUGGUUCA | 305 |
| 1911 | CGGAAACGAUGCUCUCAUG | 107 | 1911 | CGGAAACGAUGCUCUCAUG | 107 | 1929 | CAUGAGAGCAUCGUUUCCG | 306 |
| 1929 | GCCAUCUUUGACCGAAACG | 108 | 1929 | GCCAUCUUUGACCGAAACG | 108 | 1947 | CGUUUCGGUCAAAGAUGGC | 307 |
| 1947 | GAAAACCACCGUGGAGCUC | 109 | 1947 | GAAAACCACCGUGGAGCUC | 109 | 1965 | GAGCUCCACGGUGGUUUUC | 308 |
| 1965 | CCUUCCCGUGAAUGGAGAG | 110 | 1965 | CCUUCCCGUGAAUGGAGAG | 110 | 1983 | CUCUCCAUUCACGGGAAGG | 309 |
| 1983 | GUUCAGCCUGGACGAUCUC | 111 | 1983 | GUUCAGCCUGGACGAUCUC | 111 | 2001 | GAGAUCGUCCAGGCUGAAC | 310 |
| 2001 | CCAGCCGUGGCAUUCUUUU | 112 | 2001 | CCAGCCGUGGCAUUCUUUU | 112 | 2019 | AAAAGAAUGCCACGGCUGG | 311 |
| 2019 | UGGGGCUGACUCUGUGCCA | 113 | 2019 | UGGGGCUGACUCUGUGCCA | 113 | 2037 | UGGCACAGAGUCAGCCCCA | 312 |
| 2037 | AGCCAACACAGAAAACGAA | 114 | 2037 | AGCCAACACAGAAAACGAA | 114 | 2055 | UUCGUUUUCUGUGUUGGCU | 313 |
| 2055 | AGUUGAGCCUGUUGAUGCC | 115 | 2055 | AGUUGAGCCUGUUGAUGCC | 115 | 2073 | GGCAUCAACAGGCUCAACU | 314 |
| 2073 | CCGCCCUGCUGCCGACCGA | 116 | 2073 | CCGCCCUGCUGCCGACCGA | 116 | 2091 | UCGGUCGGCAGCAGGGCGG | 315 |
| 2091 | AGGACUGACCACUCGACCA | 117 | 2091 | AGGACUGACCACUCGACCA | 117 | 2109 | UGGUCGAGUGGUCAGUCCU | 316 |
| 2109 | AGGUUCUGGGUUGACAAAU | 118 | 2109 | AGGUUCUGGGUUGACAAAU | 118 | 2127 | AUUUGUCAACCCAGAACCU | 317 |
| 2127 | UAUCAAGACGGAGGAGAUC | 119 | 2127 | UAUCAAGACGGAGGAGAUC | 119 | 2145 | GAUCUCCUCCGUCUUGAUA | 318 |
| 2145 | CUCUGAAGUGAAGAUGGAU | 120 | 2145 | CUCUGAAGUGAAGAUGGAU | 120 | 2163 | AUCCAUCUUCACUUCAGAG | 319 |
| 2163 | UGCAGAAUUCCGACAUGAC | 121 | 2163 | UGCAGAAUUCCGACAUGAC | 121 | 2181 | GUCAUGUCGGAAUUCUGCA | 320 |
| 2181 | CUCAGGAUAUGAAGUUCAU | 122 | 2181 | CUCAGGAUAUGAAGUUCAU | 122 | 2199 | AUGAACUUCAUAUCCUGAG | 321 |
| 2199 | UCAUCAAAAAUUGGUGUUC | 123 | 2199 | UCAUCAAAAAUUGGUGUUC | 123 | 2217 | GAACACCAAUUUUUGAUGA | 322 |
| 2217 | CUUUGCAGAAGAUGUGGGU | 124 | 2217 | CUUUGCAGAAGAUGUGGGU | 124 | 2235 | ACCCACAUCUUCUGCAAAG | 323 |
| 2235 | UUCAAACAAAGGUGCAAUC | 125 | 2235 | UUCAAACAAAGGUGCAAUC | 125 | 2253 | GAUUGCACCUUUGUUUGAA | 324 |
| 2253 | CAUUGGACUCAUGGUGGGC | 126 | 2253 | CAUUGGACUCAUGGUGGGC | 126 | 2271 | GCCCACCAUGAGUCCAAUG | 325 |
| 2271 | CGGUGUUGUCAUAGCGACA | 127 | 2271 | CGGUGUUGUCAUAGCGACA | 127 | 2289 | UGUCGCUAUGACAACACCG | 326 |
| 2289 | AGUGAUCGUCAUCACCUUG | 128 | 2289 | AGUGAUCGUCAUCACCUUG | 128 | 2307 | CAAGGUGAUGACGAUCACU | 327 |
| 2307 | GGUGAUGCUGAAGAAGAAA | 129 | 2307 | GGUGAUGCUGAAGAAGAAA | 129 | 2325 | UUUCUUCUUCAGCAUCACC | 328 |
| 2325 | ACAGUACACAUCCAUUCAU | 130 | 2325 | ACAGUACACAUCCAUUCAU | 130 | 2343 | AUGAAUGGAUGUGUACUGU | 329 |
| 2343 | UCAUGGUGUGGUGGAGGUU | 131 | 2343 | UCAUGGUGUGGUGGAGGUU | 131 | 2361 | AACCUCCACCACACCAUGA | 330 |
| 2361 | UGACGCCGCUGUCACCCCA | 132 | 2361 | UGACGCCGCUGUCACCCCA | 132 | 2379 | UGGGGUGACAGCGGCGUCA | 331 |
| 2379 | AGAGGAGCGCCACCUGUCC | 133 | 2379 | AGAGGAGCGCCACCUGUCC | 133 | 2397 | GGACAGGUGGCGCUCCUCU | 332 |
| 2397 | CAAGAUGCAGCAGAACGGC | 134 | 2397 | CAAGAUGCAGCAGAACGGC | 134 | 2415 | GCCGUUCUGCUGCAUCUUG | 333 |
| 2415 | CUACGAAAAUCCAACCUAC | 135 | 2415 | CUACGAAAAUCCAACCUAC | 135 | 2433 | GUAGGUUGGAUUUUCGUAG | 334 |
| 2433 | CAAGUUCUUUGAGCAGAUG | 136 | 2433 | CAAGUUCUUUGAGCAGAUG | 136 | 2451 | CAUCUGCUCAAAGAACUUG | 335 |
| 2451 | GCAGAACUAGACCCCCGCC | 137 | 2451 | GCAGAACUAGACCCCCGCC | 137 | 2469 | GGCGGGGGUCUAGUUCUGC | 336 |
| 2469 | CACAGCAGCCUCUGAAGUU | 138 | 2469 | CACAGCAGCCUCUGAAGUU | 138 | 2487 | AACUUCAGAGGCUGCUGUG | 337 |
| 2487 | UGGACAGCAAAACCAUUGC | 139 | 2487 | UGGACAGCAAAACCAUUGC | 139 | 2505 | GCAAUGGUUUUGCUGUCCA | 338 |
| 2505 | CUUCACUACCCAUCGGUGU | 140 | 2505 | CUUCACUACCCAUCGGUGU | 140 | 2523 | ACACCGAUGGGUAGUGAAG | 339 |
| 2523 | UCCAUUUAUAGAAUAAUGU | 141 | 2523 | UCCAUUUAUAGAAUAAUGU | 141 | 2541 | ACAUUAUUCUAUAAAUGGA | 340 |
| 2541 | UGGGAAGAAACAAACCCGU | 142 | 2541 | UGGGAAGAAACAAACCCGU | 142 | 2559 | ACGGGUUUGUUUCUUCCCA | 341 |
| 2559 | UUUUAUGAUUUACUCAUUA | 143 | 2559 | UUUUAUGAUUUACUCAUUA | 143 | 2577 | UAAUGAGUAAAUCAUAAAA | 342 |
| 2577 | AUCGCCUUUUGACAGCUGU | 144 | 2577 | AUCGCCUUUUGACAGCUGU | 144 | 2595 | ACAGCUGUCAAAAGGCGAU | 343 |
| 2595 | UGCUGUAACACAAGUAGAU | 145 | 2595 | UGCUGUAACACAAGUAGAU | 145 | 2613 | AUCUACUUGUGUUACAGCA | 344 |
| 2613 | UGCCUGAACUUGAAUUAAU | 146 | 2613 | UGCCUGAACUUGAAUUAAU | 146 | 2631 | AUUAAUUCAAGUUCAGGCA | 345 |
| 2631 | UCCACACAUCAGUAAUGUA | 147 | 2631 | UCCACACAUCAGUAAUGUA | 147 | 2649 | UACAUUACUGAUGUGUGGA | 346 |
| 2649 | AUUCUAUCUCUCUUUACAU | 148 | 2649 | AUUCUAUCUCUCUUUACAU | 148 | 2667 | AUGUAAAGAGAGAUAGAAU | 347 |
| 2667 | UUUUGGUCUCUAUACUACA | 149 | 2667 | UUUUGGUCUCUAUACUACA | 149 | 2685 | UGUAGUAUAGAGACCAAAA | 348 |
| 2685 | AUUAUUAAUGGGUUUUGUG | 150 | 2685 | AUUAUUAAUGGGUUUUGUG | 150 | 2703 | CACAAAACCCAUUAAUAAU | 349 |
| 2703 | GUACUGUAAAGAAUUUAGC | 151 | 2703 | GUACUGUAAAGAAUUUAGC | 151 | 2721 | GCUAAAUUCUUUACAGUAC | 350 |
| 2721 | CUGUAUCAAACUAGUGCAU | 152 | 2721 | CUGUAUCAAACUAGUGCAU | 152 | 2739 | AUGCACUAGUUUGAUACAG | 351 |
| 2739 | UGAAUAGAUUCUCUCCUGA | 153 | 2739 | UGAAUAGAUUCUCUCCUGA | 153 | 2757 | UCAGGAGAGAAUCUAUUCA | 352 |
| 2757 | AUUAUUUAUCACAUAGCCC | 154 | 2757 | AUUAUUUAUCACAUAGCCC | 154 | 2775 | GGGCUAUGUGAUAAAUAAU | 353 |
| 2775 | CCUUAGCCAGUUGUAUAUU | 155 | 2775 | CCUUAGCCAGUUGUAUAUU | 155 | 2793 | AAUAUACAACUGGCUAAGG | 354 |
| 2793 | UAUUCUUGUGGUUUGUGAC | 156 | 2793 | UAUUCUUGUGGUUUGUGAC | 156 | 2811 | GUCACAAACCACAAGAAUA | 355 |
| 2811 | CCCAAUUAAGUCCUACUUU | 157 | 2811 | CCCAAUUAAGUCCUACUUU | 157 | 2829 | AAAGUAGGACUUAAUUGGG | 356 |
| 2829 | UACAUAUGCUUUAAGAAUC | 158 | 2829 | UACAUAUGCUUUAAGAAUC | 158 | 2847 | GAUUCUUAAAGCAUAUGUA | 357 |
| 2847 | CGAUGGGGGAUGCUUCAUG | 159 | 2847 | CGAUGGGGGAUGCUUCAUG | 159 | 2865 | CAUGAAGCAUCCCCCAUCG | 358 |
| 2865 | GUGAACGUGGGAGUUCAGC | 160 | 2865 | GUGAACGUGGGAGUUCAGC | 160 | 2883 | GCUGAACUCCCACGUUCAC | 359 |
| 2883 | CUGCUUCUCUUGCCUAAGU | 161 | 2883 | CUGCUUCUCUUGCCUAAGU | 161 | 2901 | ACUUAGGCAAGAGAAGCAG | 360 |
| 2901 | UAUUCCUUUCCUGAUCACU | 162 | 2901 | UAUUCCUUUCCUGAUCACU | 162 | 2919 | AGUGAUCAGGAAAGGAAUA | 361 |
| 2919 | UAUGCAUUUUAAAGUUAAA | 163 | 2919 | UAUGCAUUUUAAAGUUAAA | 163 | 2937 | UUUAACUUUAAAAUGCAUA | 362 |
| 2937 | ACAUUUUUAAGUAUUUCAG | 164 | 2937 | ACAUUUUUAAGUAUUUCAG | 164 | 2955 | CUGAAAUACUUAAAAAUGU | 363 |
| 2955 | GAUGCUUUAGAGAGAUUUU | 165 | 2955 | GAUGCUUUAGAGAGAUUUU | 165 | 2973 | AAAAUCUCUCUAAAGCAUC | 364 |
| 2973 | UUUUUCCAUGACUGCAUUU | 166 | 2973 | UUUUUCCAUGACUGCAUUU | 166 | 2991 | AAAUGCAGUCAUGGAAAAA | 365 |
| 2991 | UUACUGUACAGAUUGCUGC | 167 | 2991 | UUACUGUACAGAUUGCUGC | 167 | 3009 | GCAGCAAUCUGUACAGUAA | 366 |
| 3009 | CUUCUGCUAUAUUUGUGAU | 168 | 3009 | CUUCUGCUAUAUUUGUGAU | 168 | 3027 | AUCACAAAUAUAGCAGAAG | 367 |
| 3027 | UAUAGGAAUUAAGAGGAUA | 169 | 3027 | UAUAGGAAUUAAGAGGAUA | 169 | 3045 | UAUCCUCUUAAUUCCUAUA | 368 |
| 3045 | ACACACGUUUGUUUCUUCG | 170 | 3045 | ACACACGUUUGUUUCUUCG | 170 | 3063 | CGAAGAAACAAACGUGUGU | 369 |
| 3063 | GUGCCUGUUUUAUGUGCAC | 171 | 3063 | GUGCCUGUUUUAUGUGCAC | 171 | 3081 | GUGCACAUAAAACAGGCAC | 370 |
| 3081 | CACAUUAGGCAUUGAGACU | 172 | 3081 | CACAUUAGGCAUUGAGACU | 172 | 3099 | AGUCUCAAUGCCUAAUGUG | 371 |
| 3099 | UUCAAGCUUUUCUUUUUUU | 173 | 3099 | UUCAAGCUUUUCUUUUUUU | 173 | 3117 | AAAAAAAGAAAAGCUUGAA | 372 |
| 3117 | UGUCCACGUAUCUUUGGGU | 174 | 3117 | UGUCCACGUAUCUUUGGGU | 174 | 3135 | ACCCAAAGAUACGUGGACA | 373 |
| 3135 | UCUUUGAUAAAGAAAAGAA | 175 | 3135 | UCUUUGAUAAAGAAAAGAA | 175 | 3153 | UUCUUUUCUUUAUCAAAGA | 374 |
| 3153 | AUCCCUGUUCAUUGUAAGC | 176 | 3153 | AUCCCUGUUCAUUGUAAGC | 176 | 3171 | GCUUACAAUGAACAGGGAU | 375 |
| 3171 | CACUUUUACGGGGCGGGUG | 177 | 3171 | CACUUUUACGGGGCGGGUG | 177 | 3189 | CACCCGCCCCGUAAAAGUG | 376 |
| 3189 | GGGGAGGGGUGCUCUGCUG | 178 | 3189 | GGGGAGGGGUGCUCUGCUG | 178 | 3207 | CAGCAGAGCACCCCUCCCC | 377 |
| 3207 | GGUCUUCAAUUACCAAGAA | 179 | 3207 | GGUCUUCAAUUACCAAGAA | 179 | 3225 | UUCUUGGUAAUUGAAGACC | 378 |
| 3225 | AUUCUCCAAAACAAUUUUC | 180 | 3225 | AUUCUCCAAAACAAUUUUC | 180 | 3243 | GAAAAUUGUUUUGGAGAAU | 379 |
| 3243 | CUGCAGGAUGAUUGUACAG | 181 | 3243 | CUGCAGGAUGAUUGUACAG | 181 | 3261 | CUGUACAAUCAUCCUGCAG | 380 |
| 3261 | GAAUCAUUGCUUAUGACAU | 182 | 3261 | GAAUCAUUGCUUAUGACAU | 182 | 3279 | AUGUCAUAAGCAAUGAUUC | 381 |
| 3279 | UGAUCGCUUUCUACACUGU | 183 | 3279 | UGAUCGCUUUCUACACUGU | 183 | 3297 | ACAGUGUAGAAAGCGAUCA | 382 |
| 3297 | UAUUACAUAAAUAAAUUAA | 184 | 3297 | UAUUACAUAAAUAAAUUAA | 184 | 3315 | UUAAUUUAUUUAUGUAAUA | 383 |
| 3315 | AAUAAAAUAACCCCGGGCA | 185 | 3315 | AAUAAAAUAACCCCGGGCA | 185 | 3333 | UGCCCGGGGUUAUUUUAUU | 384 |
| 3333 | AAGACUUUUCUUUGAAGGA | 186 | 3333 | AAGACUUUUCUUUGAAGGA | 186 | 3351 | UCCUUCAAAGAAAAGUCUU | 385 |
| 3351 | AUGACUACAGACAUUAAAU | 187 | 3351 | AUGACUACAGACAUUAAAU | 187 | 3369 | AUUUAAUGUCUGUAGUCAU | 386 |
| 3369 | UAAUCGAAGUAAUUUUGGG | 188 | 3369 | UAAUCGAAGUAAUUUUGGG | 188 | 3387 | CCCAAAAUUACUUCGAUUA | 387 |
| 3387 | GUGGGGAGAAGAGGCAGAU | 189 | 3387 | GUGGGGAGAAGAGGCAGAU | 189 | 3405 | AUCUGCCUCUUCUCCCCAC | 388 |
| 3405 | UUCAAUUUUCUUUAACCAG | 190 | 3405 | UUCAAUUUUCUUUAACCAG | 190 | 3423 | CUGGUUAAAGAAAAUUGAA | 389 |
| 3423 | GUCUGAAGUUUCAUUUAUG | 191 | 3423 | GUCUGAAGUUUCAUUUAUG | 191 | 3441 | CAUAAAUGAAACUUCAGAC | 390 |
| 3441 | GAUACAAAAGAAGAUGAAA | 192 | 3441 | GAUACAAAAGAAGAUGAAA | 192 | 3459 | UUUCAUCUUCUUUUGUAUC | 391 |
| 3459 | AAUGGAAGUGGCAAUAUAA | 193 | 3459 | AAUGGAAGUGGCAAUAUAA | 193 | 3477 | UUAUAUUGCCACUUCCAUU | 392 |
| 3477 | AGGGGAUGAGGAAGGCAUG | 194 | 3477 | AGGGGAUGAGGAAGGCAUG | 194 | 3495 | CAUGCCUUCCUCAUCCCCU | 393 |
| 3495 | GCCUGGACAAACCCUUCUU | 195 | 3495 | GCCUGGACAAACCCUUCUU | 195 | 3513 | AAGAAGGGUUUGUCCAGGC | 394 |
| 3513 | UUUAAGAUGUGUCUUCAAU | 196 | 3513 | UUUAAGAUGUGUCUUCAAU | 196 | 3531 | AUUGAAGACACAUCUUAAA | 395 |
| 3531 | UUUGUAUAAAAUGGUGUUU | 197 | 3531 | UUUGUAUAAAAUGGUGUUU | 197 | 3549 | AAACACCAUUUUAUACAAA | 396 |
| 3549 | UUCAUGUAAAUAAAUACAU | 198 | 3549 | UUCAUGUAAAUAAAUACAU | 198 | 3567 | AUGUAUUUAUUUACAUGAA | 397 |
| 3559 | UAAAUACAUUCUUGGAGGA | 199 | 3559 | UAAAUACAUUCUUGGAGGA | 199 | 3577 | UCCUCCAAGAAUGUAUUUA | 398 |

BACE NM_012104

| | | |
|---|---|---|
| Seq | Seq | Seq |

| | | | | | | | | |
|---|---|---|---|---|---|---|---|---|
| Pos | Seq | ID | UPos | Upper seq | ID | LPos | Lower seq | ID |

| | | | | | | | | |
|---|---|---|---|---|---|---|---|---|
| 1 | CGCACUCGUCCCCAGCCCG | 399 | 1 | CGCACUCGUCCCCAGCCCG | 399 | 19 | CGGGCUGGGGACGAGUGCG | 724 |
| 19 | GCCCGGGAGCUGCGAGCCG | 400 | 19 | GCCCGGGAGCUGCGAGCCG | 400 | 37 | CGGCUCGCAGCUCCCGGGC | 725 |
| 37 | GCGAGCUGGAUUAUGGUGG | 401 | 37 | GCGAGCUGGAUUAUGGUGG | 401 | 55 | CCACCAUAAUCCAGCUCGC | 726 |
| 55 | GCCUGAGCAGCCAACGCAG | 402 | 55 | GCCUGAGCAGCCAACGCAG | 402 | 73 | CUGCGUUGGCUGCUCAGGC | 727 |
| 73 | GCCGCAGGAGCCCGGAGCC | 403 | 73 | GCCGCAGGAGCCCGGAGCC | 403 | 91 | GGCUCCGGGCUCCUGCGGC | 728 |
| 91 | CCUUGCCCCUGCCCGCGCC | 404 | 91 | CCUUGCCCCUGCCCGCGCC | 404 | 109 | GGCGCGGGCAGGGGCAAGG | 729 |
| 109 | CGCCGCCCGCCGGGGGGAC | 405 | 109 | CGCCGCCCGCCGGGGGGAC | 405 | 127 | GUCCCCCCGGCGGGCGGCG | 730 |
| 127 | CCAGGGAAGCCGCCACCGG | 406 | 127 | CCAGGGAAGCCGCCACCGG | 406 | 145 | CCGGUGGCGGCUUCCCUGG | 731 |
| 145 | GCCCGCCAUGCCCGCCCCU | 407 | 145 | GCCCGCCAUGCCCGCCCCU | 407 | 163 | AGGGGCGGGCAUGGCGGGC | 732 |
| 163 | UCCCAGCCCCGCCGGGAGC | 408 | 163 | UCCCAGCCCCGCCGGGAGC | 408 | 181 | GCUCCCGGCGGGGCUGGGA | 733 |
| 181 | CCCGCGCCCGCUGCCCAGG | 409 | 181 | CCCGCGCCCGCUGCCCAGG | 409 | 199 | CCUGGGCAGCGGGCGCGGG | 734 |
| 199 | GCUGGCCGCCGCCGUGCCG | 410 | 199 | GCUGGCCGCCGCCGUGCCG | 410 | 217 | CGGCACGGCGGCGGCCAGC | 735 |
| 217 | GAUGUAGCGGGCUCCGGAU | 411 | 217 | GAUGUAGCGGGCUCCGGAU | 411 | 235 | AUCCGGAGCCCGCUACAUC | 736 |
| 235 | UCCCAGCCUCUCCCCUGCU | 412 | 235 | UCCCAGCCUCUCCCCUGCU | 412 | 253 | AGCAGGGGAGAGGCUGGGA | 737 |
| 253 | UCCCGUGCUCUGCGGAUCU | 413 | 253 | UCCCGUGCUCUGCGGAUCU | 413 | 271 | AGAUCCGCAGAGCACGGGA | 738 |
| 271 | UCCCCUGACCGCUCUCCAC | 414 | 271 | UCCCCUGACCGCUCUCCAC | 414 | 289 | GUGGAGAGCGGUCAGGGGA | 739 |
| 289 | CAGCCCGGACCCGGGGGCU | 415 | 289 | CAGCCCGGACCCGGGGGCU | 415 | 307 | AGCCCCCGGGUCCGGGCUG | 740 |
| 307 | UGGCCCAGGGCCCUGCAGG | 416 | 307 | UGGCCCAGGGCCCUGCAGG | 416 | 325 | CCUGCAGGGCCCUGGGCCA | 741 |
| 325 | GCCCUGGCGUCCUGAUGCC | 417 | 325 | GCCCUGGCGUCCUGAUGCC | 417 | 343 | GGCAUCAGGACGCCAGGGC | 742 |
| 343 | CCCCAAGCUCCCUCUCCUG | 418 | 343 | CCCCAAGCUCCCUCUCCUG | 418 | 361 | CAGGAGAGGGAGCUUGGGG | 743 |
| 361 | GAGAAGCCACCAGCACCAC | 419 | 361 | GAGAAGCCACCAGCACCAC | 419 | 379 | GUGGUGCUGGUGGCUUCUC | 744 |
| 379 | CCCAGACUUGGGGGCAGGC | 420 | 379 | CCCAGACUUGGGGGCAGGC | 420 | 397 | GCCUGCCCCCAAGUCUGGG | 745 |
| 397 | CGCCAGGGACGGACGUGGG | 421 | 397 | CGCCAGGGACGGACGUGGG | 421 | 415 | CCCACGUCCGUCCCUGGCG | 746 |
| 415 | GCCAGUGCGAGCCCAGAGG | 422 | 415 | GCCAGUGCGAGCCCAGAGG | 422 | 433 | CCUCUGGGCUCGCACUGGC | 747 |
| 433 | GGCCCGAAGGCCGGGGCCC | 423 | 433 | GGCCCGAAGGCCGGGGCCC | 423 | 451 | GGGCCCCGGCCUUCGGGCC | 748 |
| 451 | CACCAUGGCCCAAGCCCUG | 424 | 451 | CACCAUGGCCCAAGCCCUG | 424 | 469 | CAGGGCUUGGGCCAUGGUG | 749 |
| 469 | GCCCUGGCUCCUGCUGUGG | 425 | 469 | GCCCUGGCUCCUGCUGUGG | 425 | 487 | CCACAGCAGGAGCCAGGGC | 750 |
| 487 | GAUGGGCGCGGGAGUGCUG | 426 | 487 | GAUGGGCGCGGGAGUGCUG | 426 | 505 | CAGCACUCCCGCGCCCAUC | 751 |
| 505 | GCCUGCCCACGGCACCCAG | 427 | 505 | GCCUGCCCACGGCACCCAG | 427 | 523 | CUGGGUGCCGUGGGCAGGC | 752 |
| 523 | GCACGGCAUCCGGCUGCCC | 428 | 523 | GCACGGCAUCCGGCUGCCC | 428 | 541 | GGGCAGCCGGAUGCCGUGC | 753 |
| 541 | CCUGCGCAGCGGCCUGGGG | 429 | 541 | CCUGCGCAGCGGCCUGGGG | 429 | 559 | CCCCAGGCCGCUGCGCAGG | 754 |
| 559 | GGGCGCCCCCCUGGGGCUG | 430 | 559 | GGGCGCCCCCCUGGGGCUG | 430 | 577 | CAGCCCCAGGGGGGCGCCC | 755 |
| 577 | GCGGCUGCCCCGGGAGACC | 431 | 577 | GCGGCUGCCCCGGGAGACC | 431 | 595 | GGUCUCCCGGGGCAGCCGC | 756 |
| 595 | CGACGAAGAGCCCGAGGAG | 432 | 595 | CGACGAAGAGCCCGAGGAG | 432 | 613 | CUCCUCGGGCUCUUCGUCG | 757 |
| 613 | GCCCGGCCGGAGGGGCAGC | 433 | 613 | GCCCGGCCGGAGGGGCAGC | 433 | 631 | GCUGCCCCUCCGGCCGGGC | 758 |
| 631 | CUUUGUGGAGAUGGUGGAC | 434 | 631 | CUUUGUGGAGAUGGUGGAC | 434 | 649 | GUCCACCAUCUCCACAAAG | 759 |
| 649 | CAACCUGAGGGGCAAGUCG | 435 | 649 | CAACCUGAGGGGCAAGUCG | 435 | 667 | CGACUUGCCCCUCAGGUUG | 760 |
| 667 | GGGGCAGGGCUACUACGUG | 436 | 667 | GGGGCAGGGCUACUACGUG | 436 | 685 | CACGUAGUAGCCCUGCCCC | 761 |
| 685 | GGAGAUGACCGUGGGCAGC | 437 | 685 | GGAGAUGACCGUGGGCAGC | 437 | 703 | GCUGCCCACGGUCAUCUCC | 762 |
| 703 | CCCCCCGCAGACGCUCAAC | 438 | 703 | CCCCCCGCAGACGCUCAAC | 438 | 721 | GUUGAGCGUCUGCGGGGGG | 763 |
| 721 | CAUCCUGGUGGAUACAGGC | 439 | 721 | CAUCCUGGUGGAUACAGGC | 439 | 739 | GCCUGUAUCCACCAGGAUG | 764 |
| 739 | CAGCAGUAACUUUGCAGUG | 440 | 739 | CAGCAGUAACUUUGCAGUG | 440 | 757 | CACUGCAAAGUUACUGCUG | 765 |
| 757 | GGGUGCUGCCCCCCACCCC | 441 | 757 | GGGUGCUGCCCCCCACCCC | 441 | 775 | GGGGUGGGGGGCAGCACCC | 766 |
| 775 | CUUCCUGCAUCGCUACUAC | 442 | 775 | CUUCCUGCAUCGCUACUAC | 442 | 793 | GUAGUAGCGAUGCAGGAAG | 767 |
| 793 | CCAGAGGCAGCUGUCCAGC | 443 | 793 | CCAGAGGCAGCUGUCCAGC | 443 | 811 | GCUGGACAGCUGCCUCUGG | 768 |
| 811 | CACAUACCGGGACCUCCGG | 444 | 811 | CACAUACCGGGACCUCCGG | 444 | 829 | CCGGAGGUCCCGGUAUGUG | 769 |
| 829 | GAAGGGUGUGUAUGUGCCC | 445 | 829 | GAAGGGUGUGUAUGUGCCC | 445 | 847 | GGGCACAUACACACCCUUC | 770 |
| 847 | CUACACCCAGGGCAAGUGG | 446 | 847 | CUACACCCAGGGCAAGUGG | 446 | 865 | CCACUUGCCCUGGGUGUAG | 771 |
| 865 | GGAAGGGGAGCUGGGCACC | 447 | 865 | GGAAGGGGAGCUGGGCACC | 447 | 883 | GGUGCCCAGCUCCCCUUCC | 772 |
| 883 | CGACCUGGUAAGCAUCCCC | 448 | 883 | CGACCUGGUAAGCAUCCCC | 448 | 901 | GGGGAUGCUUACCAGGUCG | 773 |
| 901 | CCAUGGCCCCAACGUCACU | 449 | 901 | CCAUGGCCCCAACGUCACU | 449 | 919 | AGUGACGUUGGGGCCAUGG | 774 |
| 919 | UGUGCGUGCCAACAUUGCU | 450 | 919 | UGUGCGUGCCAACAUUGCU | 450 | 937 | AGCAAUGUUGGCACGCACA | 775 |
| 937 | UGCCAUCACUGAAUCAGAC | 451 | 937 | UGCCAUCACUGAAUCAGAC | 451 | 955 | GUCUGAUUCAGUGAUGGCA | 776 |
| 955 | CAAGUUCUUCAUCAACGGC | 452 | 955 | CAAGUUCUUCAUCAACGGC | 452 | 973 | GCCGUUGAUGAAGAACUUG | 777 |
| 973 | CUCCAACUGGGAAGGCAUC | 453 | 973 | CUCCAACUGGGAAGGCAUC | 453 | 991 | GAUGCCUUCCCAGUUGGAG | 778 |
| 991 | CCUGGGGCUGGCCUAUGCU | 454 | 991 | CCUGGGGCUGGCCUAUGCU | 454 | 1009 | AGCAUAGGCCAGCCCCAGG | 779 |
| 1009 | UGAGAUUGCCAGGCCUGAC | 455 | 1009 | UGAGAUUGCCAGGCCUGAC | 455 | 1027 | GUCAGGCCUGGCAAUCUCA | 780 |
| 1027 | CGACUCCCUGGAGCCUUUC | 456 | 1027 | CGACUCCCUGGAGCCUUUC | 456 | 1045 | GAAAGGCUCCAGGGAGUCG | 781 |
| 1045 | CUUUGACUCUCUGGUAAAG | 457 | 1045 | CUUUGACUCUCUGGUAAAG | 457 | 1063 | CUUUACCAGAGAGUCAAAG | 782 |
| 1063 | GCAGACCCACGUUCCCAAC | 458 | 1063 | GCAGACCCACGUUCCCAAC | 458 | 1081 | GUUGGGAACGUGGGUCUGC | 783 |
| 1081 | CCUCUUCUCCCUGCAGCUU | 459 | 1081 | CCUCUUCUCCCUGCAGCUU | 459 | 1099 | AAGCUGCAGGGAGAAGAGG | 784 |
| 1099 | UUGUGGUGCUGGCUUCCCC | 460 | 1099 | UUGUGGUGCUGGCUUCCCC | 460 | 1117 | GGGGAAGCCAGCACCACAA | 785 |
| 1117 | CCUCAACCAGUCUGAAGUG | 461 | 1117 | CCUCAACCAGUCUGAAGUG | 461 | 1135 | CACUUCAGACUGGUUGAGG | 786 |
| 1135 | GCUGGCCUCUGUCGGAGGG | 462 | 1135 | GCUGGCCUCUGUCGGAGGG | 462 | 1153 | CCCUCCGACAGAGGCCAGC | 787 |
| 1153 | GAGCAUGAUCAUUGGAGGU | 463 | 1153 | GAGCAUGAUCAUUGGAGGU | 463 | 1171 | ACCUCCAAUGAUCAUGCUC | 788 |
| 1171 | UAUCGACCACUCGCUGUAC | 464 | 1171 | UAUCGACCACUCGCUGUAC | 464 | 1189 | GUACAGCGAGUGGUCGAUA | 789 |
| 1189 | CACAGGCAGUCUCUGGUAU | 465 | 1189 | CACAGGCAGUCUCUGGUAU | 465 | 1207 | AUACCAGAGACUGCCUGUG | 790 |
| 1207 | UACACCCAUCCGGCGGGAG | 466 | 1207 | UACACCCAUCCGGCGGGAG | 466 | 1225 | CUCCCGCCGGAUGGGUGUA | 791 |
| 1225 | GUGGUAUUAUGAGGUCAUC | 467 | 1225 | GUGGUAUUAUGAGGUCAUC | 467 | 1243 | GAUGACCUCAUAAUACCAC | 792 |
| 1243 | CAUUGUGCGGGUGGAGAUC | 468 | 1243 | CAUUGUGCGGGUGGAGAUC | 468 | 1261 | GAUCUCCACCCGCACAAUG | 793 |
| 1261 | CAAUGGACAGGAUCUGAAA | 469 | 1261 | CAAUGGACAGGAUCUGAAA | 469 | 1279 | UUUCAGAUCCUGUCCAUUG | 794 |
| 1279 | AAUGGACUGCAAGGAGUAC | 470 | 1279 | AAUGGACUGCAAGGAGUAC | 470 | 1297 | GUACUCCUUGCAGUCCAUU | 795 |
| 1297 | CAACUAUGACAAGAGCAUU | 471 | 1297 | CAACUAUGACAAGAGCAUU | 471 | 1315 | AAUGCUCUUGUCAUAGUUG | 796 |
| 1315 | UGUGGACAGUGGCACCACC | 472 | 1315 | UGUGGACAGUGGCACCACC | 472 | 1333 | GGUGGUGCCACUGUCCACA | 797 |
| 1333 | CAACCUUCGUUUGCCCAAG | 473 | 1333 | CAACCUUCGUUUGCCCAAG | 473 | 1351 | CUUGGGCAAACGAAGGUUG | 798 |
| 1351 | GAAAGUGUUUGAAGCUGCA | 474 | 1351 | GAAAGUGUUUGAAGCUGCA | 474 | 1369 | UGCAGCUUCAAACACUUUC | 799 |
| 1369 | AGUCAAAUCCAUCAAGGCA | 475 | 1369 | AGUCAAAUCCAUCAAGGCA | 475 | 1387 | UGCCUUGAUGGAUUUGACU | 800 |
| 1387 | AGCCUCCUCCACGGAGAAG | 476 | 1387 | AGCCUCCUCCACGGAGAAG | 476 | 1405 | CUUCUCCGUGGAGGAGGCU | 801 |
| 1405 | GUUCCCUGAUGGUUUCUGG | 477 | 1405 | GUUCCCUGAUGGUUUCUGG | 477 | 1423 | CCAGAAACCAUCAGGGAAC | 802 |
| 1423 | GCUAGGAGAGCAGCUGGUG | 478 | 1423 | GCUAGGAGAGCAGCUGGUG | 478 | 1441 | CACCAGCUGCUCUCCUAGC | 803 |
| 1441 | GUGCUGGCAAGCAGGCACC | 479 | 1441 | GUGCUGGCAAGCAGGCACC | 479 | 1459 | GGUGCCUGCUUGCCAGCAC | 804 |
| 1459 | CACCCCUUGGAACAUUUUC | 480 | 1459 | CACCCCUUGGAACAUUUUC | 480 | 1477 | GAAAAUGUUCCAAGGGGUG | 805 |
| 1477 | CCCAGUCAUCUCACUCUAC | 481 | 1477 | CCCAGUCAUCUCACUCUAC | 481 | 1495 | GUAGAGUGAGAUGACUGGG | 806 |
| 1495 | CCUAAUGGGUGAGGUUACC | 482 | 1495 | CCUAAUGGGUGAGGUUACC | 482 | 1513 | GGUAACCUCACCCAUUAGG | 807 |
| 1513 | CAACCAGUCCUUCCGCAUC | 483 | 1513 | CAACCAGUCCUUCCGCAUC | 483 | 1531 | GAUGCGGAAGGACUGGUUG | 808 |
| 1531 | CACCAUCCUUCCGCAGCAA | 484 | 1531 | CACCAUCCUUCCGCAGCAA | 484 | 1549 | UUGCUGCGGAAGGAUGGUG | 809 |
| 1549 | AUACCUGCGGCCAGUGGAA | 485 | 1549 | AUACCUGCGGCCAGUGGAA | 485 | 1567 | UUCCACUGGCCGCAGGUAU | 810 |
| 1567 | AGAUGUGGCCACGUCCCAA | 486 | 1567 | AGAUGUGGCCACGUCCCAA | 486 | 1585 | UUGGGACGUGGCCACAUCU | 811 |
| 1585 | AGACGACUGUUACAAGUUU | 487 | 1585 | AGACGACUGUUACAAGUUU | 487 | 1603 | AAACUUGUAACAGUCGUCU | 812 |
| 1603 | UGCCAUCUCACAGUCAUCC | 488 | 1603 | UGCCAUCUCACAGUCAUCC | 488 | 1621 | GGAUGACUGUGAGAUGGCA | 813 |
| 1621 | CACGGGCACUGUUAUGGGA | 489 | 1621 | CACGGGCACUGUUAUGGGA | 489 | 1639 | UCCCAUAACAGUGCCCGUG | 814 |
| 1639 | AGCUGUUAUCAUGGAGGGC | 490 | 1639 | AGCUGUUAUCAUGGAGGGC | 490 | 1657 | GCCCUCCAUGAUAACAGCU | 815 |
| 1657 | CUUCUACGUUGUCUUUGAU | 491 | 1657 | CUUCUACGUUGUCUUUGAU | 491 | 1675 | AUCAAAGACAACGUAGAAG | 816 |
| 1675 | UCGGGCCCGAAAACGAAUU | 492 | 1675 | UCGGGCCCGAAAACGAAUU | 492 | 1693 | AAUUCGUUUUCGGGCCCGA | 817 |
| 1693 | UGGCUUUGCUGUCAGCGCU | 493 | 1693 | UGGCUUUGCUGUCAGCGCU | 493 | 1711 | AGCGCUGACAGCAAAGCCA | 818 |
| 1711 | UUGCCAUGUGCACGAUGAG | 494 | 1711 | UUGCCAUGUGCACGAUGAG | 494 | 1729 | CUCAUCGUGCACAUGGCAA | 819 |
| 1729 | GUUCAGGACGGCAGCGGUG | 495 | 1729 | GUUCAGGACGGCAGCGGUG | 495 | 1747 | CACCGCUGCCGUCCUGAAC | 820 |
| 1747 | GGAAGGCCCUUUUGUCACC | 496 | 1747 | GGAAGGCCCUUUUGUCACC | 496 | 1765 | GGUGACAAAAGGGCCUUCC | 821 |
| 1765 | CUUGGACAUGGAAGACUGU | 497 | 1765 | CUUGGACAUGGAAGACUGU | 497 | 1783 | ACAGUCUUCCAUGUCCAAG | 822 |
| 1783 | UGGCUACAACAUUCCACAG | 498 | 1783 | UGGCUACAACAUUCCACAG | 498 | 1801 | CUGUGGAAUGUUGUAGCCA | 823 |
| 1801 | GACAGAUGAGUCAACCCUC | 499 | 1801 | GACAGAUGAGUCAACCCUC | 499 | 1819 | GAGGGUUGACUCAUCUGUC | 824 |
| 1819 | CAUGACCAUAGCCUAUGUC | 500 | 1819 | CAUGACCAUAGCCUAUGUC | 500 | 1837 | GACAUAGGCUAUGGUCAUG | 825 |
| 1837 | CAUGGCUGCCAUCUGCGCC | 501 | 1837 | CAUGGCUGCCAUCUGCGCC | 501 | 1855 | GGCGCAGAUGGCAGCCAUG | 826 |
| 1855 | CCUCUUCAUGCUGCCACUC | 502 | 1855 | CCUCUUCAUGCUGCCACUC | 502 | 1873 | GAGUGGCAGCAUGAAGAGG | 827 |
| 1873 | CUGCCUCAUGGUGUGUCAG | 503 | 1873 | CUGCCUCAUGGUGUGUCAG | 503 | 1891 | CUGACACACCAUGAGGCAG | 828 |
| 1891 | GUGGCGCUGCCUCCGCUGC | 504 | 1891 | GUGGCGCUGCCUCCGCUGC | 504 | 1909 | GCAGCGGAGGCAGCGCCAC | 829 |
| 1909 | CCUGCGCCAGCAGCAUGAU | 505 | 1909 | CCUGCGCCAGCAGCAUGAU | 505 | 1927 | AUCAUGCUGCUGGCGCAGG | 830 |
| 1927 | UGACUUUGCUGAUGACAUC | 506 | 1927 | UGACUUUGCUGAUGACAUC | 506 | 1945 | GAUGUCAUCAGCAAAGUCA | 831 |
| 1945 | CUCCCUGCUGAAGUGAGGA | 507 | 1945 | CUCCCUGCUGAAGUGAGGA | 507 | 1963 | UCCUCACUUCAGCAGGGAG | 832 |
| 1963 | AGGCCCAUGGGCAGAAGAU | 508 | 1963 | AGGCCCAUGGGCAGAAGAU | 508 | 1981 | AUCUUCUGCCCAUGGGCCU | 833 |
| 1981 | UAGAGAUUCCCCUGGACCA | 509 | 1981 | UAGAGAUUCCCCUGGACCA | 509 | 1999 | UGGUCCAGGGGAAUCUCUA | 834 |
| 1999 | ACACCUCCGUGGUUCACUU | 510 | 1999 | ACACCUCCGUGGUUCACUU | 510 | 2017 | AAGUGAACCACGGAGGUGU | 835 |
| 2017 | UUGGUCACAAGUAGGAGAC | 511 | 2017 | UUGGUCACAAGUAGGAGAC | 511 | 2035 | GUCUCCUACUUGUGACCAA | 836 |
| 2035 | CACAGAUGGCACCUGUGGC | 512 | 2035 | CACAGAUGGCACCUGUGGC | 512 | 2053 | GCCACAGGUGCCAUCUGUG | 837 |
| 2053 | CCAGAGCACCUCAGGACCC | 513 | 2053 | CCAGAGCACCUCAGGACCC | 513 | 2071 | GGGUCCUGAGGUGCUCUGG | 838 |
| 2071 | CUCCCCACCCACCAAAUGC | 514 | 2071 | CUCCCCACCCACCAAAUGC | 514 | 2089 | GCAUUUGGUGGGUGGGGAG | 839 |
| 2089 | CCUCUGCCUUGAUGGAGAA | 515 | 2089 | CCUCUGCCUUGAUGGAGAA | 515 | 2107 | UUCUCCAUCAAGGCAGAGG | 840 |
| 2107 | AGGAAAAGGCUGGCAAGGU | 516 | 2107 | AGGAAAAGGCUGGCAAGGU | 516 | 2125 | ACCUUGCCAGCCUUUUCCU | 841 |
| 2125 | UGGGUUCCAGGGACUGUAC | 517 | 2125 | UGGGUUCCAGGGACUGUAC | 517 | 2143 | GUACAGUCCCUGGAACCCA | 842 |
| 2143 | CCUGUAGGAAACAGAAAAG | 518 | 2143 | CCUGUAGGAAACAGAAAAG | 518 | 2161 | CUUUUCUGUUUCCUACAGG | 843 |
| 2161 | GAGAAGAAAGAAGCACUCU | 519 | 2161 | GAGAAGAAAGAAGCACUCU | 519 | 2179 | AGAGUGCUUCUUUCUUCUC | 844 |
| 2179 | UGCUGGCGGGAAUACUCUU | 520 | 2179 | UGCUGGCGGGAAUACUCUU | 520 | 2197 | AAGAGUAUUCCCGCCAGCA | 845 |
| 2197 | UGGUCACCUCAAAUUUAAG | 521 | 2197 | UGGUCACCUCAAAUUUAAG | 521 | 2215 | CUUAAAUUUGAGGUGACCA | 846 |
| 2215 | GUCGGGAAAUUCUGCUGCU | 522 | 2215 | GUCGGGAAAUUCUGCUGCU | 522 | 2233 | AGCAGCAGAAUUUCCCGAC | 847 |
| 2233 | UUGAAACUUCAGCCCUGAA | 523 | 2233 | UUGAAACUUCAGCCCUGAA | 523 | 2251 | UUCAGGGCUGAAGUUUCAA | 848 |
| 2251 | ACCUUUGUCCACCAUUCCU | 524 | 2251 | ACCUUUGUCCACCAUUCCU | 524 | 2269 | AGGAAUGGUGGACAAAGGU | 849 |
| 2269 | UUUAAAUUCUCCAACCCAA | 525 | 2269 | UUUAAAUUCUCCAACCCAA | 525 | 2287 | UUGGGUUGGAGAAUUUAAA | 850 |
| 2287 | AAGUAUUCUUCUUUUCUUA | 526 | 2287 | AAGUAUUCUUCUUUUCUUA | 526 | 2305 | UAAGAAAAGAAGAAUACUU | 851 |
| 2305 | AGUUUCAGAAGUACUGGCA | 527 | 2305 | AGUUUCAGAAGUACUGGCA | 527 | 2323 | UGCCAGUACUUCUGAAACU | 852 |
| 2323 | AUCACACGCAGGUUACCUU | 528 | 2323 | AUCACACGCAGGUUACCUU | 528 | 2341 | AAGGUAACCUGCGUGUGAU | 853 |
| 2341 | UGGCGUGUGUCCCUGUGGU | 529 | 2341 | UGGCGUGUGUCCCUGUGGU | 529 | 2359 | ACCACAGGGACACACGCCA | 854 |
| 2359 | UACCCUGGCAGAGAAGAGA | 530 | 2359 | UACCCUGGCAGAGAAGAGA | 530 | 2377 | UCUCUUCUCUGCCAGGGUA | 855 |
| 2377 | ACCAAGCUUGUUUCCCUGC | 531 | 2377 | ACCAAGCUUGUUUCCCUGC | 531 | 2395 | GCAGGGAAACAAGCUUGGU | 856 |
| 2395 | CUGGCCAAAGUCAGUAGGA | 532 | 2395 | CUGGCCAAAGUCAGUAGGA | 532 | 2413 | UCCUACUGACUUUGGCCAG | 857 |
| 2413 | AGAGGAUGCACAGUUUGCU | 533 | 2413 | AGAGGAUGCACAGUUUGCU | 533 | 2431 | AGCAAACUGUGCAUCCUCU | 858 |
| 2431 | UAUUUGCUUUAGAGACAGG | 534 | 2431 | UAUUUGCUUUAGAGACAGG | 534 | 2449 | CCUGUCUCUAAAGCAAAUA | 859 |
| 2449 | GGACUGUAUAAACAAGCCU | 535 | 2449 | GGACUGUAUAAACAAGCCU | 535 | 2467 | AGGCUUGUUUAUACAGUCC | 860 |
| 2467 | UAACAUUGGUGCAAAGAUU | 536 | 2467 | UAACAUUGGUGCAAAGAUU | 536 | 2485 | AAUCUUUGCACCAAUGUUA | 861 |
| 2485 | UGCCUCUUGAAUUAAAAAA | 537 | 2485 | UGCCUCUUGAAUUAAAAAA | 537 | 2503 | UUUUUUAAUUCAAGAGGCA | 862 |
| 2503 | AAAAAACUAGAUUGACUAU | 538 | 2503 | AAAAAACUAGAUUGACUAU | 538 | 2521 | AUAGUCAAUCUAGUUUUUU | 863 |
| 2521 | UUUAUACAAAUGGGGGCGG | 539 | 2521 | UUUAUACAAAUGGGGGCGG | 539 | 2539 | CCGCCCCCAUUUGUAUAAA | 864 |
| 2539 | GCUGGAAAGAGGAGAAGGA | 540 | 2539 | GCUGGAAAGAGGAGAAGGA | 540 | 2557 | UCCUUCUCCUCUUUCCAGC | 865 |
| 2557 | AGAGGGAGUACAAAGACAG | 541 | 2557 | AGAGGGAGUACAAAGACAG | 541 | 2575 | CUGUCUUUGUACUCCCUCU | 866 |
| 2575 | GGGAAUAGUGGGAUCAAAG | 542 | 2575 | GGGAAUAGUGGGAUCAAAG | 542 | 2593 | CUUUGAUCCCACUAUUCCC | 867 |
| 2593 | GCUAGGAAAGGCAGAAACA | 543 | 2593 | GCUAGGAAAGGCAGAAACA | 543 | 2611 | UGUUUCUGCCUUUCCUAGC | 868 |
| 2611 | ACAACCACUCACCAGUCCU | 544 | 2611 | ACAACCACUCACCAGUCCU | 544 | 2629 | AGGACUGGUGAGUGGUUGU | 869 |
| 2629 | UAGUUUUAGACCUCAUCUC | 545 | 2629 | UAGUUUUAGACCUCAUCUC | 545 | 2647 | GAGAUGAGGUCUAAAACUA | 870 |
| 2647 | CCAAGAUAGCAUCCCAUCU | 546 | 2647 | CCAAGAUAGCAUCCCAUCU | 546 | 2665 | AGAUGGGAUGCUAUCUUGG | 871 |
| 2665 | UCAGAAGAUGGGUGUUGUU | 547 | 2665 | UCAGAAGAUGGGUGUUGUU | 547 | 2683 | AACAACACCCAUCUUCUGA | 872 |
| 2683 | UUUCAAUGUUUUCUUUUCU | 548 | 2683 | UUUCAAUGUUUUCUUUUCU | 548 | 2701 | AGAAAAGAAAACAUUGAAA | 873 |
| 2701 | UGUGGUUGCAGCCUGACCA | 549 | 2701 | UGUGGUUGCAGCCUGACCA | 549 | 2719 | UGGUCAGGCUGCAACCACA | 874 |
| 2719 | AAAAGUGAGAUGGGAAGGG | 550 | 2719 | AAAAGUGAGAUGGGAAGGG | 550 | 2737 | CCCUUCCCAUCUCACUUUU | 875 |
| 2737 | GCUUAUCUAGCCAAAGAGC | 551 | 2737 | GCUUAUCUAGCCAAAGAGC | 551 | 2755 | GCUCUUUGGCUAGAUAAGC | 876 |
| 2755 | CUCUUUUUUAGCUCUCUUA | 552 | 2755 | CUCUUUUUUAGCUCUCUUA | 552 | 2773 | UAAGAGAGCUAAAAAAGAG | 877 |
| 2773 | AAAUGAAGUGCCCACUAAG | 553 | 2773 | AAAUGAAGUGCCCACUAAG | 553 | 2791 | CUUAGUGGGCACUUCAUUU | 878 |
| 2791 | GAAGUUCCACUUAACACAU | 554 | 2791 | GAAGUUCCACUUAACACAU | 554 | 2809 | AUGUGUUAAGUGGAACUUC | 879 |
| 2809 | UGAAUUUCUGCCAUAUUAA | 555 | 2809 | UGAAUUUCUGCCAUAUUAA | 555 | 2827 | UUAAUAUGGCAGAAAUUCA | 880 |
| 2827 | AUUUCAUUGUCUCUAUCUG | 556 | 2827 | AUUUCAUUGUCUCUAUCUG | 556 | 2845 | CAGAUAGAGACAAUGAAAU | 881 |
| 2845 | GAACCACCCUUUAUUCUAC | 557 | 2845 | GAACCACCCUUUAUUCUAC | 557 | 2863 | GUAGAAUAAAGGGUGGUUC | 882 |
| 2863 | CAUAUGAUAGGCAGCACUG | 558 | 2863 | CAUAUGAUAGGCAGCACUG | 558 | 2881 | CAGUGCUGCCUAUCAUAUG | 883 |
| 2881 | GAAAUAUCCUAACCCCCUA | 559 | 2881 | GAAAUAUCCUAACCCCCUA | 559 | 2899 | UAGGGGGUUAGGAUAUUUC | 884 |
| 2899 | AAGCUCCAGGUGCCCUGUG | 560 | 2899 | AAGCUCCAGGUGCCCUGUG | 560 | 2917 | CACAGGGCACCUGGAGCUU | 885 |
| 2917 | GGGAGAGCAACUGGACUAU | 561 | 2917 | GGGAGAGCAACUGGACUAU | 561 | 2935 | AUAGUCCAGUUGCUCUCCC | 886 |
| 2935 | UAGCAGGGCUGGGCUCUGU | 562 | 2935 | UAGCAGGGCUGGGCUCUGU | 562 | 2953 | ACAGAGCCCAGCCCUGCUA | 887 |
| 2953 | UCUUCCUGGUCAUAGGCUC | 563 | 2953 | UCUUCCUGGUCAUAGGCUC | 563 | 2971 | GAGCCUAUGACCAGGAAGA | 888 |
| 2971 | CACUCUUUCCCCCAAAUCU | 564 | 2971 | CACUCUUUCCCCCAAAUCU | 564 | 2989 | AGAUUUGGGGGAAAGAGUG | 889 |
| 2989 | UUCCUCUGGAGCUUUGCAG | 565 | 2989 | UUCCUCUGGAGCUUUGCAG | 565 | 3007 | CUGCAAAGCUCCAGAGGAA | 890 |
| 3007 | GCCAAGGUGCUAAAAGGAA | 566 | 3007 | GCCAAGGUGCUAAAAGGAA | 566 | 3025 | UUCCUUUUAGCACCUUGGC | 891 |
| 3025 | AUAGGUAGGAGACCUCUUC | 567 | 3025 | AUAGGUAGGAGACCUCUUC | 567 | 3043 | GAAGAGGUCUCCUACCUAU | 892 |
| 3043 | CUAUCUAAUCCUUAAAAGC | 568 | 3043 | CUAUCUAAUCCUUAAAAGC | 568 | 3061 | GCUUUUAAGGAUUAGAUAG | 893 |
| 3061 | CAUAAUGUUGAACAUUCAU | 569 | 3061 | CAUAAUGUUGAACAUUCAU | 569 | 3079 | AUGAAUGUUCAACAUUAUG | 894 |
| 3079 | UUCAACAGCUGAUGCCCUA | 570 | 3079 | UUCAACAGCUGAUGCCCUA | 570 | 3097 | UAGGGCAUCAGCUGUUGAA | 895 |
| 3097 | AUAACCCCUGCCUGGAUUU | 571 | 3097 | AUAACCCCUGCCUGGAUUU | 571 | 3115 | AAAUCCAGGCAGGGGUUAU | 896 |
| 3115 | UCUUCCUAUUAGGCUAUAA | 572 | 3115 | UCUUCCUAUUAGGCUAUAA | 572 | 3133 | UUAUAGCCUAAUAGGAAGA | 897 |
| 3133 | AGAAGUAGCAAGAUCUUUA | 573 | 3133 | AGAAGUAGCAAGAUCUUUA | 573 | 3151 | UAAAGAUCUUGCUACUUCU | 898 |
| 3151 | ACAUAAUUCAGAGUGGUUU | 574 | 3151 | ACAUAAUUCAGAGUGGUUU | 574 | 3169 | AAACCACUCUGAAUUAUGU | 899 |
| 3169 | UCAUUGCCUUCCUACCCUC | 575 | 3169 | UCAUUGCCUUCCUACCCUC | 575 | 3187 | GAGGGUAGGAAGGCAAUGA | 900 |
| 3187 | CUCUAAUGGCCCCUCCAUU | 576 | 3187 | CUCUAAUGGCCCCUCCAUU | 576 | 3205 | AAUGGAGGGGCCAUUAGAG | 901 |
| 3205 | UUAUUUGACUAAAGCAUCA | 577 | 3205 | UUAUUUGACUAAAGCAUCA | 577 | 3223 | UGAUGCUUUAGUCAAAUAA | 902 |
| 3223 | ACACAGUGGCACUAGCAUU | 578 | 3223 | ACACAGUGGCACUAGCAUU | 578 | 3241 | AAUGCUAGUGCCACUGUGU | 903 |
| 3241 | UAUACCAAGAGUAUGAGAA | 579 | 3241 | UAUACCAAGAGUAUGAGAA | 579 | 3259 | UUCUCAUACUCUUGGUAUA | 904 |
| 3259 | AAUACAGUGCUUUAUGGCU | 580 | 3259 | AAUACAGUGCUUUAUGGCU | 580 | 3277 | AGCCAUAAAGCACUGUAUU | 905 |
| 3277 | UCUAACAUUACUGCCUUCA | 581 | 3277 | UCUAACAUUACUGCCUUCA | 581 | 3295 | UGAAGGCAGUAAUGUUAGA | 906 |
| 3295 | AGUAUCAAGGCUGCCUGGA | 582 | 3295 | AGUAUCAAGGCUGCCUGGA | 582 | 3313 | UCCAGGCAGCCUUGAUACU | 907 |
| 3313 | AGAAAGGAUGGCAGCCUCA | 583 | 3313 | AGAAAGGAUGGCAGCCUCA | 583 | 3331 | UGAGGCUGCCAUCCUUUCU | 908 |
| 3331 | AGGGCUUCCUUAUGUCCUC | 584 | 3331 | AGGGCUUCCUUAUGUCCUC | 584 | 3349 | GAGGACAUAAGGAAGCCCU | 909 |
| 3349 | CCACCACAAGAGCUCCUUG | 585 | 3349 | CCACCACAAGAGCUCCUUG | 585 | 3367 | CAAGGAGCUCUUGUGGUGG | 910 |
| 3367 | GAUGAAGGUCAUCUUUUUC | 586 | 3367 | GAUGAAGGUCAUCUUUUUC | 586 | 3385 | GAAAAAGAUGACCUUCAUC | 911 |
| 3385 | CCCCUAUCCUGUUCUUCCC | 587 | 3385 | CCCCUAUCCUGUUCUUCCC | 587 | 3403 | GGGAAGAACAGGAUAGGGG | 912 |
| 3403 | CCUCCCCGCUCCUAAUGGU | 588 | 3403 | CCUCCCCGCUCCUAAUGGU | 588 | 3421 | ACCAUUAGGAGCGGGGAGG | 913 |
| 3421 | UACGUGGGUACCCAGGCUG | 589 | 3421 | UACGUGGGUACCCAGGCUG | 589 | 3439 | CAGCCUGGGUACCCACGUA | 914 |
| 3439 | GGUUCUUGGGCUAGGUAGU | 590 | 3439 | GGUUCUUGGGCUAGGUAGU | 590 | 3457 | ACUACCUAGCCCAAGAACC | 915 |
| 3457 | UGGGGACCAAGUUCAUUAC | 591 | 3457 | UGGGGACCAAGUUCAUUAC | 591 | 3475 | GUAAUGAACUUGGUCCCCA | 916 |
| 3475 | CCUCCCUAUCAGUUCUAGC | 592 | 3475 | CCUCCCUAUCAGUUCUAGC | 592 | 3493 | GCUAGAACUGAUAGGGAGG | 917 |
| 3493 | CAUAGUAAACUACGGUACC | 593 | 3493 | CAUAGUAAACUACGGUACC | 593 | 3511 | GGUACCGUAGUUUACUAUG | 918 |
| 3511 | CAGUGUUAGUGGGAAGAGC | 594 | 3511 | CAGUGUUAGUGGGAAGAGC | 594 | 3529 | GCUCUUCCCACUAACACUG | 919 |
| 3529 | CUGGGUUUUCCUAGUAUAC | 595 | 3529 | CUGGGUUUUCCUAGUAUAC | 595 | 3547 | GUAUACUAGGAAAACCCAG | 920 |
| 3547 | CCCACUGCAUCCUACUCCU | 596 | 3547 | CCCACUGCAUCCUACUCCU | 596 | 3565 | AGGAGUAGGAUGCAGUGGG | 921 |
| 3565 | UACCUGGUCAACCCGCUGC | 597 | 3565 | UACCUGGUCAACCCGCUGC | 597 | 3583 | GCAGCGGGUUGACCAGGUA | 922 |
| 3583 | CUUCCAGGUAUGGGACCUG | 598 | 3583 | CUUCCAGGUAUGGGACCUG | 598 | 3601 | CAGGUCCCAUACCUGGAAG | 923 |
| 3601 | GCUAAGUGUGGAAUUACCU | 599 | 3601 | GCUAAGUGUGGAAUUACCU | 599 | 3619 | AGGUAAUUCCACACUUAGC | 924 |
| 3619 | UGAUAAGGGAGAGGGAAAU | 600 | 3619 | UGAUAAGGGAGAGGGAAAU | 600 | 3637 | AUUUCCCUCUCCCUUAUCA | 925 |
| 3637 | UACAAGGAGGGCCUCUGGU | 601 | 3637 | UACAAGGAGGGCCUCUGGU | 601 | 3655 | ACCAGAGGCCCUCCUUGUA | 926 |
| 3655 | UGUUCCUGGCCUCAGCCAG | 602 | 3655 | UGUUCCUGGCCUCAGCCAG | 602 | 3673 | CUGGCUGAGGCCAGGAACA | 927 |
| 3673 | GCUGCCCACAAGCCAUAAA | 603 | 3673 | GCUGCCCACAAGCCAUAAA | 603 | 3691 | UUUAUGGCUUGUGGGCAGC | 928 |
| 3691 | ACCAAUAAAACAAGAAUAC | 604 | 3691 | ACCAAUAAAACAAGAAUAC | 604 | 3709 | GUAUUCUUGUUUUAUUGGU | 929 |
| 3709 | CUGAGUCAGUUUUUUAUCU | 605 | 3709 | CUGAGUCAGUUUUUUAUCU | 605 | 3727 | AGAUAAAAAACUGACUCAG | 930 |
| 3727 | UGGGUUCUCUUCAUUCCCA | 606 | 3727 | UGGGUUCUCUUCAUUCCCA | 606 | 3745 | UGGGAAUGAAGAGAACCCA | 931 |
| 3745 | ACUGCACUUGGUGCUGCUU | 607 | 3745 | ACUGCACUUGGUGCUGCUU | 607 | 3763 | AAGCAGCACCAAGUGCAGU | 932 |
| 3763 | UUGGCUGACUGGGAACACC | 608 | 3763 | UUGGCUGACUGGGAACACC | 608 | 3781 | GGUGUUCCCAGUCAGCCAA | 933 |
| 3781 | CCCAUAACUACAGAGUCUG | 609 | 3781 | CCCAUAACUACAGAGUCUG | 609 | 3799 | CAGACUCUGUAGUUAUGGG | 934 |
| 3799 | GACAGGAAGACUGGAGACU | 610 | 3799 | GACAGGAAGACUGGAGACU | 610 | 3817 | AGUCUCCAGUCUUCCUGUC | 935 |
| 3817 | UGUCCACUUCUAGCUCGGA | 611 | 3817 | UGUCCACUUCUAGCUCGGA | 611 | 3835 | UCCGAGCUAGAAGUGGACA | 936 |
| 3835 | AACUUACUGUGUAAAUAAA | 612 | 3835 | AACUUACUGUGUAAAUAAA | 612 | 3853 | UUUAUUUACACAGUAAGUU | 937 |
| 3853 | ACUUUCAGAACUGCUACCA | 613 | 3853 | ACUUUCAGAACUGCUACCA | 613 | 3871 | UGGUAGCAGUUCUGAAAGU | 938 |
| 3871 | AUGAAGUGAAAAUGCCACA | 614 | 3871 | AUGAAGUGAAAAUGCCACA | 614 | 3889 | UGUGGCAUUUUCACUUCAU | 939 |
| 3889 | AUUUUGCUUUAUAAUUUCU | 615 | 3889 | AUUUUGCUUUAUAAUUUCU | 615 | 3907 | AGAAAUUAUAAAGCAAAAU | 940 |
| 3907 | UACCCAUGUUGGGAAAAAC | 616 | 3907 | UACCCAUGUUGGGAAAAAC | 616 | 3925 | GUUUUUCCCAACAUGGGUA | 941 |
| 3925 | CUGGCUUUUUCCCAGCCCU | 617 | 3925 | CUGGCUUUUUCCCAGCCCU | 617 | 3943 | AGGGCUGGGAAAAAGCCAG | 942 |
| 3943 | UUUCCAGGGCAUAAAACUC | 618 | 3943 | UUUCCAGGGCAUAAAACUC | 618 | 3961 | GAGUUUUAUGCCCUGGAAA | 943 |
| 3961 | CAACCCCUUCGAUAGCAAG | 619 | 3961 | CAACCCCUUCGAUAGCAAG | 619 | 3979 | CUUGCUAUCGAAGGGGUUG | 944 |
| 3979 | GUCCCAUCAGCCUAUUAUU | 620 | 3979 | GUCCCAUCAGCCUAUUAUU | 620 | 3997 | AAUAAUAGGCUGAUGGGAC | 945 |
| 3997 | UUUUUUAAAGAAAACUUGC | 621 | 3997 | UUUUUUAAAGAAAACUUGC | 621 | 4015 | GCAAGUUUUCUUUAAAAAA | 946 |
| 4015 | CACUUGUUUUUCUUUUUAC | 622 | 4015 | CACUUGUUUUUCUUUUUAC | 622 | 4033 | GUAAAAAGAAAAACAAGUG | 947 |
| 4033 | CAGUUACUUCCUUCCUGCC | 623 | 4033 | CAGUUACUUCCUUCCUGCC | 623 | 4051 | GGCAGGAAGGAAGUAACUG | 948 |
| 4051 | CCCAAAAUUAUAAACUCUA | 624 | 4051 | CCCAAAAUUAUAAACUCUA | 624 | 4069 | UAGAGUUUAUAAUUUUGGG | 949 |
| 4069 | AAGUGUAAAAAAAAGUCUU | 625 | 4069 | AAGUGUAAAAAAAAGUCUU | 625 | 4087 | AAGACUUUUUUUUACACUU | 950 |
| 4087 | UAACAACAGCUUCUUGCUU | 626 | 4087 | UAACAACAGCUUCUUGCUU | 626 | 4105 | AAGCAAGAAGCUGUUGUUA | 951 |
| 4105 | UGUAAAAAUAUGUAUUAUA | 627 | 4105 | UGUAAAAAUAUGUAUUAUA | 627 | 4123 | UAUAAUACAUAUUUUUACA | 952 |
| 4123 | ACAUCUGUAUUUUUAAAUU | 628 | 4123 | ACAUCUGUAUUUUUAAAUU | 628 | 4141 | AAUUUAAAAAUACAGAUGU | 953 |
| 4141 | UCUGCUCCUGAAAAAUGAC | 629 | 4141 | UCUGCUCCUGAAAAAUGAC | 629 | 4159 | GUCAUUUUUCAGGAGCAGA | 954 |
| 4159 | CUGUCCCAUUCUCCACUCA | 630 | 4159 | CUGUCCCAUUCUCCACUCA | 630 | 4177 | UGAGUGGAGAAUGGGACAG | 955 |
| 4177 | ACUGCAUUUGGGGCCUUUC | 631 | 4177 | ACUGCAUUUGGGGCCUUUC | 631 | 4195 | GAAAGGCCCCAAAUGCAGU | 956 |
| 4195 | CCCAUUGGUCUGCAUGUCU | 632 | 4195 | CCCAUUGGUCUGCAUGUCU | 632 | 4213 | AGACAUGCAGACCAAUGGG | 957 |
| 4213 | UUUUAUCAUUGCAGGCCAG | 633 | 4213 | UUUUAUCAUUGCAGGCCAG | 633 | 4231 | CUGGCCUGCAAUGAUAAAA | 958 |
| 4231 | GUGGACAGAGGGAGAAGGG | 634 | 4231 | GUGGACAGAGGGAGAAGGG | 634 | 4249 | CCCUUCUCCCUCUGUCCAC | 959 |
| 4249 | GAGAACAGGGGUCGCCAAC | 635 | 4249 | GAGAACAGGGGUCGCCAAC | 635 | 4267 | GUUGGCGACCCCUGUUCUC | 960 |
| 4267 | CACUUGUGUUGCUUUCUGA | 636 | 4267 | CACUUGUGUUGCUUUCUGA | 636 | 4285 | UCAGAAAGCAACACAAGUG | 961 |
| 4285 | ACUGAUCCUGAACAAGAAA | 637 | 4285 | ACUGAUCCUGAACAAGAAA | 637 | 4303 | UUUCUUGUUCAGGAUCAGU | 962 |
| 4303 | AGAGUAACACUGAGGCGCU | 638 | 4303 | AGAGUAACACUGAGGCGCU | 638 | 4321 | AGCGCCUCAGUGUUACUCU | 963 |
| 4321 | UCGCUCCCAUGCACAACUC | 639 | 4321 | UCGCUCCCAUGCACAACUC | 639 | 4339 | GAGUUGUGCAUGGGAGCGA | 964 |
| 4339 | CUCCAAAACACUUAUCCUC | 640 | 4339 | CUCCAAAACACUUAUCCUC | 640 | 4357 | GAGGAUAAGUGUUUUGGAG | 965 |
| 4357 | CCUGCAAGAGUGGGCUUUC | 641 | 4357 | CCUGCAAGAGUGGGCUUUC | 641 | 4375 | GAAAGCCCACUCUUGCAGG | 966 |
| 4375 | CCAGGGUCUUUACUGGGAA | 642 | 4375 | CCAGGGUCUUUACUGGGAA | 642 | 4393 | UUCCCAGUAAAGACCCUGG | 967 |
| 4393 | AGCAGUUAAGCCCCCUCCU | 643 | 4393 | AGCAGUUAAGCCCCCUCCU | 643 | 4411 | AGGAGGGGGCUUAACUGCU | 968 |
| 4411 | UCACCCCUUCCUUUUUUCU | 644 | 4411 | UCACCCCUUCCUUUUUUCU | 644 | 4429 | AGAAAAAAGGAAGGGGUGA | 969 |
| 4429 | UUUCUUUACUCCUUUGGCU | 645 | 4429 | UUUCUUUACUCCUUUGGCU | 645 | 4447 | AGCCAAAGGAGUAAAGAAA | 970 |
| 4447 | UUCAAAGGAUUUUGGAAAA | 646 | 4447 | UUCAAAGGAUUUUGGAAAA | 646 | 4465 | UUUUCCAAAAUCCUUUGAA | 971 |
| 4465 | AGAAACAAUAUGCUUUACA | 647 | 4465 | AGAAACAAUAUGCUUUACA | 647 | 4483 | UGUAAAGCAUAUUGUUUCU | 972 |
| 4483 | ACUCAUUUUCAAUUUCUAA | 648 | 4483 | ACUCAUUUUCAAUUUCUAA | 648 | 4501 | UUAGAAAUUGAAAAUGAGU | 973 |
| 4501 | AAUUUGCAGGGGAUACUGA | 649 | 4501 | AAUUUGCAGGGGAUACUGA | 649 | 4519 | UCAGUAUCCCCUGCAAAUU | 974 |
| 4519 | AAAAAUACGGCAGGUGGCC | 650 | 4519 | AAAAAUACGGCAGGUGGCC | 650 | 4537 | GGCCACCUGCCGUAUUUUU | 975 |
| 4537 | CUAAGGCUGCUGUAAAGUU | 651 | 4537 | CUAAGGCUGCUGUAAAGUU | 651 | 4555 | AACUUUACAGCAGCCUUAG | 976 |
| 4555 | UGAGGGGAGAGGAAAUCUU | 652 | 4555 | UGAGGGGAGAGGAAAUCUU | 652 | 4573 | AAGAUUUCCUCUCCCCUCA | 977 |
| 4573 | UAAGAUUACAAGAUAAAAA | 653 | 4573 | UAAGAUUACAAGAUAAAAA | 653 | 4591 | UUUUUAUCUUGUAAUCUUA | 978 |
| 4591 | AACGAAUCCCCUAAACAAA | 654 | 4591 | AACGAAUCCCCUAAACAAA | 654 | 4609 | UUUGUUUAGGGGAUUCGUU | 979 |
| 4609 | AAAGAACAAUAGAACUGGU | 655 | 4609 | AAAGAACAAUAGAACUGGU | 655 | 4627 | ACCAGUUCUAUUGUUCUUU | 980 |
| 4627 | UCUUCCAUUUUGCCACCUU | 656 | 4627 | UCUUCCAUUUUGCCACCUU | 656 | 4645 | AAGGUGGCAAAAUGGAAGA | 981 |
| 4645 | UUCCUGUUCAUGACAGCUA | 657 | 4645 | UUCCUGUUCAUGACAGCUA | 657 | 4663 | UAGCUGUCAUGAACAGGAA | 982 |
| 4663 | ACUAACCUGGAGACAGUAA | 658 | 4663 | ACUAACCUGGAGACAGUAA | 658 | 4681 | UUACUGUCUCCAGGUUAGU | 983 |
| 4681 | ACAUUUCAUUAACCAAAGA | 659 | 4681 | ACAUUUCAUUAACCAAAGA | 659 | 4 699 | UCUUUGGUUAAUGAAAUGU | 984 |
| 4699 | AAAGUGGGUCACCUGACCU | 660 | 4699 | AAAGUGGGUCACCUGACCU | 660 | 4717 | AGGUCAGGUGACCCACUUU | 985 |
| 4717 | UCUGAAGAGCUGAGUACUC | 661 | 4717 | UCUGAAGAGCUGAGUACUC | 661 | 4735 | GAGUACUCAGCUCUUCAGA | 986 |
| 4735 | CAGGCCACUCCAAUCACCC | 662 | 4735 | CAGGCCACUCCAAUCACCC | 662 | 4753 | GGGUGAUUGGAGUGGCCUG | 987 |
| 4753 | CUACAAGAUGCCAAGGAGG | 663 | 4753 | CUACAAGAUGCCAAGGAGG | 663 | 4771 | CCUCCUUGGCAUCUUGUAG | 988 |
| 4771 | GUCCCAGGAAGUCCAGCUC | 664 | 4771 | GUCCCAGGAAGUCCAGCUC | 664 | 4789 | GAGCUGGACUUCCUGGGAC | 989 |
| 4789 | CCUUAAACUGACGCUAGUC | 665 | 4789 | CCUUAAACUGACGCUAGUC | 665 | 4807 | GACUAGCGUCAGUUUAAGG | 990 |
| 4807 | CAAUAAACCUGGGCAAGUG | 666 | 4807 | CAAUAAACCUGGGCAAGUG | 666 | 4825 | CACUUGCCCAGGUUUAUUG | 991 |
| 4825 | GAGGCAAGAGAAAUGAGGA | 667 | 4825 | GAGGCAAGAGAAAUGAGGA | 667 | 4843 | UCCUCAUUUCUCUUGCCUC | 992 |
| 4843 | AAGAAUCCAUCUGUGAGGU | 668 | 4843 | AAGAAUCCAUCUGUGAGGU | 668 | 4861 | ACCUCACAGAUGGAUUCUU | 993 |
| 4861 | UGACAGGCAAGGAUGAAAG | 669 | 4861 | UGACAGGCAAGGAUGAAAG | 669 | 4879 | CUUUCAUCCUUGCCUGUCA | 994 |
| 4879 | GACAAAGAAGGAAAAGAGU | 670 | 4879 | GACAAAGAAGGAAAAGAGU | 670 | 4897 | ACUCUUUUCCUUCUUUGUC | 995 |
| 4897 | UAUCAXAGGCAGAAAGGAG | 671 | 4897 | UAUCAAAGGCAGAAAGGAG | 671 | 4915 | CUCCUUUCUGCCUUUGAUA | 996 |
| 4915 | GAUCAUUUAGUUGGGUCUG | 672 | 4915 | GAUCAUUUAGUUGGGUCUG | 672 | 4933 | CAGACCCAACUAAAUGAUC | 997 |
| 4933 | GAAAGGAAAAGUCUUUGCU | 673 | 4933 | GAAAGGAAAAGUCUUUGCU | 673 | 4951 | AGCAAAGACUUUUCCUUUC | 998 |
| 4951 | UAUCCGACAUGUACUGCUA | 674 | 4951 | UAUCCGACAUGUACUGCUA | 674 | 4969 | UAGCAGUACAUGUCGGAUA | 999 |
| 4969 | AGUACCUGUAAGCAUUUUA | 675 | 4969 | AGUACCUGUAAGCAUUUUA | 675 | 4987 | UAAAAUGCUUACAGGUACU | 1000 |
| 4987 | AGGUCCCAGAAUGGAAAAA | 676 | 4987 | AGGUCCCAGAAUGGAAAAA | 676 | 5005 | UUUUUCCAUUCUGGGACCU | 1001 |
| 5005 | AAAAAUCAGCUAUUGGUAA | 677 | 5005 | AAAAAUCAGCUAUUGGUAA | 677 | 5023 | UUACCAAUAGCUGAUUUUU | 1002 |
| 5023 | AUAUAAUAAUGUCCUUUCC | 678 | 5023 | AUAUAAUAAUGUCCUUUCC | 678 | 5041 | GGAAAGGACAUUAUUAUAU | 1003 |
| 5041 | CCUGGAGUCAGUUUUUUUA | 679 | 5041 | CCUGGAGUCAGUUUUUUUA | 679 | 5059 | UAAAAAAACUGACUCCAGG | 1004 |
| 5059 | AAAAAGUUAACUCUUAGUU | 680 | 5059 | AAAAAGUUAACUCUUAGUU | 680 | 5077 | AACUAAGAGUUAACUUUUU | 1005 |
| 5077 | UUUUACUUGUUUAAUUCUA | 681 | 5077 | UUUUACUUGUUUAAUUCUA | 681 | 5095 | UAGAAUUAAACAAGUAAAA | 1006 |
| 5095 | AAAAGAGAAGGGAGCUGAG | 682 | 5095 | AAAAGAGAAGGGAGCUGAG | 682 | 5113 | CUCAGCUCCCUUCUCUUUU | 1007 |
| 5113 | GGCCAUUCCCUGUAGGAGU | 683 | 5113 | GGCCAUUCCCUGUAGGAGU | 683 | 5131 | ACUCCUACAGGGAAUGGCC | 1008 |
| 5131 | UAAAGAUAAAAGGAUAGGA | 684 | 5131 | UAAAGAUAAAAGGAUAGGA | 684 | 5149 | UCCUAUCCUUUUAUCUUUA | 1009 |
| 5149 | AAAAGAUUCAAAGCUCUAA | 685 | 5149 | AAAAGAUUCAAAGCUCUAA | 685 | 5167 | UUAGAGCUUUGAAUCUUUU | 1010 |
| 5167 | AUAGAGUCACAGCUUUCCC | 686 | 5167 | AUAGAGUCACAGCUUUCCC | 686 | 5185 | GGGAAAGCUGUGACUCUAU | 1011 |
| 5185 | CAGGUAUAAAACCUAAAAU | 687 | 5185 | CAGGUAUAAAACCUAAAAU | 687 | 5203 | AUUUUAGGUUUUAUACCUG | 1012 |
| 5203 | UUAAGAAGUACAAUAAGCA | 688 | 5203 | UUAAGAAGUACAAUAAGCA | 688 | 5221 | UGCUUAUUGUACUUCUUAA | 1013 |
| 5221 | AGAGGUGGAAAAUGAUCUA | 689 | 5221 | AGAGGUGGAAAAUGAUCUA | 689 | 5239 | UAGAUCAUUUUCCACCUCU | 1014 |
| 5239 | AGUUCCUGAUAGCUACCCA | 690 | 5239 | AGUUCCUGAUAGCUACCCA | 690 | 5257 | UGGGUAGCUAUCAGGAACU | 1015 |
| 5257 | ACAGAGCAAGUGAUUUAUA | 691 | 5257 | ACAGAGCAAGUGAUUUAUA | 691 | 5275 | UAUAAAUCACUUGCUCUGU | 1016 |
| 5275 | AAAUUUGAAAUCCAAACUA | 692 | 5275 | AAAUUUGAAAUCCAAACUA | 692 | 5293 | UAGUUUGGAUUUCAAAUUU | 1017 |
| 5293 | ACUUUCUUAAUAUCACUUU | 693 | 5293 | ACUUUCUUAAUAUCACUUU | 693 | 5311 | AAAGUGAUAUUAAGAAAGU | 1018 |
| 5311 | UGGUCUCCAUUUUUCCCAG | 694 | 5311 | UGGUCUCCAUUUUUCCCAG | 694 | 5329 | CUGGGAAAAAUGGAGACCA | 1019 |
| 5329 | GGACAGGAAAUAUGUCCCC | 695 | 5329 | GGACAGGAAAUAUGUCCCC | 695 | 5347 | GGGGACAUAUUUCCUGUCC | 1020 |
| 5347 | CCCCUAACUUUCUUGCUUC | 696 | 5347 | CCCCUAACUUUCUUGCUUC | 696 | 5365 | GAAGCAAGAAAGUUAGGGG | 1021 |
| 5365 | CAAAAAUUAAAAUCCAGCA | 697 | 5365 | CAAAAAUUAAAAUCCAGCA | 697 | 5383 | UGCUGGAUUUUAAUUUUUG | 1022 |
| 5383 | AUCCCAAGAUCAUUCUACA | 698 | 5383 | AUCCCAAGAUCAUUCUACA | 698 | 5401 | UGUAGAAUGAUCUUGGGAU | 1023 |
| 5401 | AAGUAAUUUUGCACAGACA | 699 | 5401 | AAGUAAUUUUGCACAGACA | 699 | 5419 | UGUCUGUGCAAAAUUACUU | 1024 |
| 5419 | AUCUCCUCACCCCAGUGCC | 700 | 5419 | AUCUCCUCACCCCAGUGCC | 700 | 5437 | GGCACUGGGGUGAGGAGAU | 1025 |
| 5437 | CUGUCUGGAGCUCACCCAA | 701 | 5437 | CUGUCUGGAGCUCACCCAA | 701 | 5455 | UUGGGUGAGCUCCAGACAG | 1026 |
| 5455 | AGGUCACCAAACAACUUGG | 702 | 5455 | AGGUCACCAAACAACUUGG | 702 | 5473 | CCAAGUUGUUUGGUGACCU | 1027 |
| 5473 | GUUGUGAACCAACUGCCUU | 703 | 5473 | GUUGUGAACCAACUGCCUU | 703 | 5491 | AAGGCAGUUGGUUCACAAC | 1028 |
| 5491 | UAACCUUCUGGGGGAGGGG | 704 | 5491 | UAACCUUCUGGGGGAGGGG | 704 | 5509 | CCCCUCCCCCAGAAGGUUA | 1029 |
| 5509 | GGAUUAGCUAGACUAGGAG | 705 | 5509 | GGAUUAGCUAGACUAGGAG | 705 | 5527 | CUCCUAGUCUAGCUAAUCC | 1030 |
| 5527 | GACCAGAAGUGAAUGGGAA | 706 | 5527 | GACCAGAAGUGAAUGGGAA | 706 | 5545 | UUCCCAUUCACUUCUGGUC | 1031 |
| 5545 | AAGGGUGAGGACUUCACAA | 707 | 5545 | AAGGGUGAGGACUUCACAA | 707 | 5563 | UUGUGAAGUCCUCACCCUU | 1032 |
| 5563 | AUGUUGGCCUGUCAGAGCU | 708 | 5563 | AUGUUGGCCUGUCAGAGCU | 708 | 5581 | AGCUCUGACAGGCCAACAU | 1033 |
| 5581 | UUGAUUAGAAGCCAAGACA | 709 | 5581 | UUGAUUAGAAGCCAAGACA | 709 | 5599 | UGUCUUGGCUUCUAAUCAA | 1034 |
| 5599 | AGUGGCAGCAAAGGAAGAC | 710 | 5599 | AGUGGCAGCAAAGGAAGAC | 710 | 5617 | GUCUUCCUUUGCUGCCACU | 1035 |
| 5617 | CUUGGCCCAGGAAAAACCU | 711 | 5617 | CUUGGCCCAGGAAAAACCU | 711 | 5635 | AGGUUUUUCCUGGGCCAAG | 1036 |
| 5635 | UGUGGGUUGUGCUAAUUUC | 712 | 5635 | UGUGGGUUGUGCUAAUUUC | 712 | 5653 | GAAAUUAGCACAACCCACA | 1037 |
| 5653 | CUGUCCAGAAAAUAGGGUG | 713 | 5653 | CUGUCCAGAAAAUAGGGUG | 713 | 5671 | CACCCUAUUUUCUGGACAG | 1038 |
| 5671 | GGACAGAAGCUUGUGGGGU | 714 | 5671 | GGACAGAAGCUUGUGGGGU | 714 | 5689 | ACCCCACAAGCUUCUGUCC | 1039 |
| 5689 | UGCAUGGAGGAAUUGGGAC | 715 | 5689 | UGCAUGGAGGAAUUGGGAC | 715 | 5707 | GUCCCAAUUCCUCCAUGCA | 1040 |
| 5707 | CCUGGUUAUGUUGUUAUUC | 716 | 5707 | CCUGGUUAUGUUGUUAUUC | 716 | 5725 | GAAUAACAACAUAACCAGG | 1041 |
| 5725 | CUCGGACUGUGAAUUUUGG | 717 | 5725 | CUCGGACUGUGAAUUUUGG | 717 | 5743 | CCAAAAUUCACAGUCCGAG | 1042 |
| 5743 | GUGAUGUAAAACAGAAUAU | 718 | 5743 | GUGAUGUAAAACAGAAUAU | 718 | 5761 | AUAUUCUGUUUUACAUCAC | 1043 |
| 5761 | UUCUGUAAACCUAAUGUCU | 719 | 5761 | UUCUGUAAACCUAAUGUCU | 719 | 5779 | AGACAUUAGGUUUACAGAA | 1044 |
| 5779 | UGUAUAAAUAAUGAGCGUU | 720 | 5779 | UGUAUAAAUAAUGAGCGUU | 720 | 5797 | AACGCUCAUUAUUUAUACA | 1045 |
| 5797 | UAACACAGUAAAAUAUUCA | 721 | 5797 | UAACACAGUAAAAUAUUCA | 721 | 5815 | UGAAUAUUUUACUGUGUUA | 1046 |
| 5815 | AAUAAGAAGUCAAAAAAAA | 722 | 5815 | AAUAAGAAGUCAAAAAAAA | 722 | 5833 | UUUUUUUUGACUUCUUAUU | 1047 |
| 5821 | AAGUCAAAAAAAAAAAAAA | 723 | 5821 | AAGUCAAAAAAAAAAAAAA | 723 | 5839 | UUUUUUUUUUUUUUGACUU | 1048 |

PSEN1 NM_007319

| | | |
|---|---|---|
| Seq | Seq | Seq |

| | | | | | | | | |
|---|---|---|---|---|---|---|---|---|
| Pos | Seq | ID | UPos | Upper seq | ID | LPos | Lower seq | ID |

| | | | | | | | | |
|---|---|---|---|---|---|---|---|---|
| 3 | GACAGAGUUACCUGCACCG | 1049 | 3 | GACAGAGUUACCUGCACCG | 1049 | 21 | CGGUGCAGGUAACUCUGUC | 1132 |
| 21 | GUUGUCCUACUUCCAGAAU | 1050 | 21 | GUUGUCCUACUUCCAGAAU | 1050 | 39 | AUUCUGGAAGUAGGACAAC | 1133 |
| 39 | UGCACAGAUGUCUGAGGAC | 1051 | 39 | UGCACAGAUGUCUGAGGAC | 1051 | 57 | GUCCUCAGACAUCUGUGCA | 1134 |
| 57 | CAACCACCUGAGCAAUACU | 1052 | 57 | CAACCACCUGAGCAAUACU | 1052 | 75 | AGUAUUGCUCAGGUGGUUG | 1135 |
| 75 | UAAUGACAAUAGAGAACGG | 1053 | 75 | UAAUGACAAUAGAGAACGG | 1053 | 93 | CCGUUCUCUAUUGUCAUUA | 1136 |
| 93 | GCAGGAGCACAACGACAGA | 1054 | 93 | GCAGGAGCACAACGACAGA | 1054 | 111 | UCUGUCGUUGUGCUCCUGC | 1137 |
| 111 | ACGGAGCCUUGGCCACCCU | 1055 | 111 | ACGGAGCCUUGGCCACCCU | 1055 | 129 | AGGGUGGCCAAGGCUCCGU | 1138 |
| 129 | UGAGCCAUUAUCUAAUGGA | 1056 | 129 | UGAGCCAUUAUCUAAUGGA | 1056 | 147 | UCCAUUAGAUAAUGGCUCA | 1139 |
| 147 | ACGACCCCAGGGUAACUCC | 1057 | 147 | ACGACCCCAGGGUAACUCC | 1057 | 165 | GGAGUUACCCUGGGGUCGU | 1140 |
| 165 | CCGGCAGGUGGUGGAGCAA | 1058 | 165 | CCGGCAGGUGGUGGAGCAA | 1058 | 183 | UUGCUCCACCACCUGCCGG | 1141 |
| 183 | AGAUGAGGAAGAAGAUGAG | 1059 | 183 | AGAUGAGGAAGAAGAUGAG | 1059 | 201 | CUCAUCUUCUUCCUCAUCU | 1142 |
| 201 | GGAGCUGACAUUGAAAUAU | 1060 | 201 | GGAGCUGACAUUGAAAUAU | 1060 | 219 | AUAUUUCAAUGUCAGCUCC | 1143 |
| 219 | UGGCGCCAAGCAUGUGAUC | 1061 | 219 | UGGCGCCAAGCAUGUGAUC | 1061 | 237 | GAUCACAUGCUUGGCGCCA | 1144 |
| 237 | CAUGCUCUUUGUCCCUGUG | 1062 | 237 | CAUGCUCUUUGUCCCUGUG | 1062 | 255 | CACAGGGACAAAGAGCAUG | 1145 |
| 255 | GACUCUCUGCAUGGUGGUG | 1063 | 255 | GACUCUCUGCAUGGUGGUG | 1063 | 273 | CACCACCAUGCAGAGAGUC | 1146 |
| 273 | GGUCGUGGCUACCAUUAAG | 1064 | 273 | GGUCGUGGCUACCAUUAAG | 1064 | 291 | CUUAAUGGUAGCCACGACC | 1147 |
| 291 | GUCAGUCAGCUUUUAUACC | 1065 | 291 | GUCAGUCAGCUUUUAUACC | 1065 | 309 | GGUAUAAAAGCUGACUGAC | 1148 |
| 309 | CCGGAAGGAUGGGCAGCUA | 1066 | 309 | CCGGAAGGAUGGGCAGCUA | 1066 | 327 | UAGCUGCCCAUCCUUCCGG | 1149 |
| 327 | AAUCUAUACCCCAUUCACA | 1067 | 327 | AAUCUAUACCCCAUUCACA | 1067 | 345 | UGUGAAUGGGGUAUAGAUU | 1150 |
| 345 | AGAAGAUACCGAGACUGUG | 1068 | 345 | AGAAGAUACCGAGACUGUG | 1068 | 363 | CACAGUCUCGGUAUCUUCU | 1151 |
| 363 | GGGCCAGAGAGCCCUGCAC | 1069 | 363 | GGGCCAGAGAGCCCUGCAC | 1069 | 381 | GUGCAGGGCUCUCUGGCCC | 1152 |
| 381 | CUCAAUUCUGAAUGCUGCC | 1070 | 381 | CUCAAUUCUGAAUGCUGCC | 1070 | 399 | GGCAGCAUUCAGAAUUGAG | 1153 |
| 399 | CAUCAUGAUCAGUGUCAUU | 1071 | 399 | CAUCAUGAUCAGUGUCAUU | 1071 | 417 | AAUGACACUGAUCAUGAUG | 1154 |
| 417 | UGUUGUCAUGACUAUCCUC | 1072 | 417 | UGUUGUCAUGACUAUCCUC | 1072 | 435 | GAGGAUAGUCAUGACAACA | 1155 |
| 435 | CCUGGUGGUUCUGUAUAAA | 1073 | 435 | CCUGGUGGUUCUGUAUAAA | 1073 | 453 | UUUAUACAGAACCACCAGG | 1156 |
| 453 | AUACAGGUGCUAUAAGGUC | 1074 | 453 | AUACAGGUGCUAUAAGGUC | 1074 | 471 | GACCUUAUAGCACCUGUAU | 1157 |
| 471 | CAUCCAUGCCUGGCUUAUU | 1075 | 471 | CAUCCAUGCCUGGCUUAUU | 1075 | 489 | AAUAAGCCAGGCAUGGAUG | 1158 |
| 489 | UAUAUCAUCUCUAUUGUUG | 1076 | 489 | UAUAUCAUCUCUAUUGUUG | 1076 | 507 | CAACAAUAGAGAUGAUAUA | 1159 |
| 507 | GCUGUUCUUUUUUUCAUUC | 1077 | 507 | GCUGUUCUUUUUUUCAUUC | 1077 | 525 | GAAUGAAAAAAAGAACAGC | 1160 |
| 525 | CAUUUACUUGGGGGAAGUG | 1078 | 525 | CAUUUACUUGGGGGAAGUG | 1078 | 543 | CACUUCCCCCAAGUAAAUG | 1161 |
| 543 | GUUUAAAACCUAUAACGUU | 1079 | 543 | GUUUAAAACCUAUAACGUU | 1079 | 561 | AACGUUAUAGGUUUUAAAC | 1162 |
| 561 | UGCUGUGGACUACAUUACU | 1080 | 561 | UGCUGUGGACUACAUUACU | 1080 | 579 | AGUAAUGUAGUCCACAGCA | 1163 |
| 579 | UGUUGCACUCCUGAUCUGG | 1081 | 579 | UGUUGCACUCCUGAUCUGG | 1081 | 597 | CCAGAUCAGGAGUGCAACA | 1164 |
| 597 | GAAUUUUGGUGUGGUGGGA | 1082 | 597 | GAAUUUUGGUGUGGUGGGA | 1082 | 615 | UCCCACCACACCAAAAUUC | 1165 |
| 615 | AAUGAUUUCCAUUCACUGG | 1083 | 615 | AAUGAUUUCCAUUCACUGG | 1083 | 633 | CCAGUGAAUGGAAAUCAUU | 1166 |
| 633 | GAAAGGUCCACUUCGACUC | 1084 | 633 | GAAAGGUCCACUUCGACUC | 1084 | 651 | GAGUCGAAGUGGACCUUUC | 1167 |
| 651 | CCAGCAGGCAUAUCUCAUU | 1085 | 651 | CCAGCAGGCAUAUCUCAUU | 1085 | 669 | AAUGAGAUAUGCCUGCUGG | 1168 |
| 669 | UAUGAUUAGUGCCCUCAUG | 1086 | 669 | UAUGAUUAGUGCCCUCAUG | 1086 | 687 | CAUGAGGGCACUAAUCAUA | 1169 |
| 687 | GGCCCUGGUGUUUAUCAAG | 1087 | 687 | GGCCCUGGUGUUUAUCAAG | 1087 | 705 | CUUGAUAAACACCAGGGCC | 1170 |
| 705 | GUACCUCCCUGAAUGGACU | 1088 | 705 | GUACCUCCCUGAAUGGACU | 1088 | 723 | AGUCCAUUCAGGGAGGUAC | 1171 |
| 723 | UGCGUGGCUCAUCUUGGCU | 1089 | 723 | UGCGUGGCUCAUCUUGGCU | 1089 | 741 | AGCCAAGAUGAGCCACGCA | 1172 |
| 741 | UGUGAUUUCGGUAUAUGAU | 1090 | 741 | UGUGAUUUCGGUAUAUGAU | 1090 | 759 | AUCAUAUACCGAAAUCACA | 1173 |
| 759 | UUUAGUGGCUGUUUUGUGU | 1091 | 759 | UUUAGUGGCUGUUUUGUGU | 1091 | 777 | ACACAAAACAGCCACUAAA | 1174 |
| 777 | UCCGAAAGGUCCACUUCGU | 1092 | 777 | UCCGAAAGGUCCACUUCGU | 1092 | 795 | ACGAAGUGGACCUUUCGGA | 1175 |
| 795 | UAUGCUGGUUGAAACAGCU | 1093 | 795 | UAUGCUGGUUGAAACAGCU | 1093 | 813 | AGCUGUUUCAACCAGCAUA | 1176 |
| 813 | UCAGGAGAGAAAUGAAACG | 1094 | 813 | UCAGGAGAGAAAUGAAACG | 1094 | 831 | CGUUUCAUUUCUCUCCUGA | 1177 |
| 831 | GCUUUUUCCAGCUCUCAUU | 1095 | 831 | GCUUUUUCCAGCUCUCAUU | 1095 | 849 | AAUGAGAGCUGGAAAAAGC | 1178 |
| 849 | UUACUCCUCAACAAUGGUG | 1096 | 849 | UUACUCCUCAACAAUGGUG | 1096 | 867 | CACCAUUGUUGAGGAGUAA | 1179 |
| 867 | GUGGUUGGUGAAUAUGGCA | 1097 | 867 | GUGGUUGGUGAAUAUGGCA | 1097 | 885 | UGCCAUAUUCACCAACCAC | 1180 |
| 885 | AGAAGGAGACCCGGAAGCU | 1098 | 885 | AGAAGGAGACCCGGAAGCU | 1098 | 903 | AGCUUCCGGGUCUCCUUCU | 1181 |
| 903 | UCAAAGGAGAGUAUCCAAA | 1099 | 903 | UCAAAGGAGAGUAUCCAAA | 1099 | 921 | UUUGGAUACUCUCCUUUGA | 1182 |
| 921 | AAAUUCCAAGUAUAAUGCA | 1100 | 921 | AAAUUCCAAGUAUAAUGCA | 1100 | 939 | UGCAUUAUACUUGGAAUUU | 1183 |
| 939 | AGAAAGAGCCUGUCUGCCU | 1101 | 939 | AGAAAGAGCCUGUCUGCCU | 1101 | 957 | AGGCAGACAGGCUCUUUCU | 1184 |
| 957 | UCCUGCUGCCAUCAACCUG | 1102 | 957 | UCCUGCUGCCAUCAACCUG | 1102 | 975 | CAGGUUGAUGGCAGCAGGA | 1185 |
| 975 | GCUGUCUAUAGCUCCCAUG | 1103 | 975 | GCUGUCUAUAGCUCCCAUG | 1103 | 993 | CAUGGGAGCUAUAGACAGC | 1186 |
| 993 | GGCACCCAGGCUGUUCAUG | 1104 | 993 | GGCACCCAGGCUGUUCAUG | 1104 | 1011 | CAUGAACAGCCUGGGUGCC | 1187 |
| 1011 | GCCAAAGGGUGCCUGCAGG | 1105 | 1011 | GCCAAAGGGUGCCUGCAGG | 1105 | 1029 | CCUGCAGGCACCCUUUGGC | 1188 |
| 1029 | GCCCACGGCACAGAAAGGG | 1106 | 1029 | GCCCACGGCACAGAAAGGG | 1106 | 1047 | CCCUUUCUGUGCCGUGGGC | 1189 |
| 1047 | GAGUCACAAGACACUGUUG | 1107 | 1047 | GAGUCACAAGACACUGUUG | 1107 | 1065 | CAACAGUGUCUUGUGACUC | 1190 |
| 1065 | GCAGAGAAUGAUGAUGGCG | 1108 | 1065 | GCAGAGAAUGAUGAUGGCG | 1108 | 1083 | CGCCAUCAUCAUUCUCUGC | 1191 |
| 1083 | GGGUUCAGUGAGGAAUGGG | 1109 | 1083 | GGGUUCAGUGAGGAAUGGG | 1109 | 1101 | CCCAUUCCUCACUGAACCC | 1192 |
| 1101 | GAAGCCCAGAGGGACAGUC | 1110 | 1101 | GAAGCCCAGAGGGACAGUC | 1110 | 1119 | GACUGUCCCUCUGGGCUUC | 1193 |
| 1119 | CAUCUAGGGCCUCAUCGCU | 1111 | 1119 | CAUCUAGGGCCUCAUCGCU | 1111 | 1137 | AGCGAUGAGGCCCUAGAUG | 1194 |
| 1137 | UCUACACCUGAGUCACGAG | 1112 | 1137 | UCUACACCUGAGUCACGAG | 1112 | 1155 | CUGGUGACUCAGGUGUAGA | 1195 |
| 1155 | GCUGCUGUCCAGGAACUUU | 1113 | 1155 | GCUGCUGUCCAGGAACUUU | 1113 | 1173 | AAAGUUCCUGGACAGCAGC | 1196 |
| 1173 | UCCAGCAGUAUCCUCGCUG | 1114 | 1173 | UCCAGCAGUAUCCUCGCUG | 1114 | 1191 | CAGCGAGGAUACUGCUGGA | 1197 |
| 1191 | GGUGAAGACCCAGAGGAAA | 1115 | 1191 | GGUGAAGACCCAGAGGAAA | 1115 | 1209 | UUUCCUCUGGGUCUUCACC | 1198 |
| 1209 | AGGGGAGUAAAACUUGGAU | 1116 | 1209 | AGGGGAGUAAAACUUGGAU | 1116 | 1227 | AUCCAAGUUUUACUCCCCU | 1199 |
| 1227 | UUGGGAGAUUUCAUUUUCU | 1117 | 1227 | UUGGGAGAUUUCAUUUUCU | 1117 | 1245 | AGAAAAUGAAAUCUCCCAA | 1200 |
| 1245 | UACAGUGUUCUGGUUGGUA | 1118 | 1245 | UACAGUGUUCUGGUUGGUA | 1118 | 1263 | UACCAACCAGAACACUGUA | 1201 |
| 1263 | AAAGCCUCAGCAACAGCCA | 1119 | 1263 | AAAGCCUCAGCAACAGCCA | 1119 | 1281 | UGGCUGUUGCUGAGGCUUU | 1202 |
| 1281 | AGUGGAGACUGGAACACAA | 1120 | 1281 | AGUGGAGACUGGAACACAA | 1120 | 1299 | UUGUGUUCCAGUCUCCACU | 1203 |
| 1299 | ACCAUAGCCUGUUUCGUAG | 1121 | 1299 | ACCAUAGCCUGUUUCGUAG | 1121 | 1317 | CUACGAAACAGGCUAUGGU | 1204 |
| 1317 | GCCAUAUUAAUUGGUUUGU | 1122 | 1317 | GCCAUAUUAAUUGGUUUGU | 1122 | 1335 | ACAAACCAAUUAAUAUGGC | 1205 |
| 1335 | UGCCUUACAUUAUUACUCC | 1123 | 1335 | UGCCUUACAUUAUUACUCC | 1123 | 1353 | GGAGUAAUAAUGUAAGGCA | 1206 |
| 1353 | CUUGCCAUUUUCAAGAAAG | 1124 | 1353 | CUUGCCAUUUUCAAGAAAG | 1124 | 1371 | CUUUCUUGAAAAUGGCAAG | 1207 |
| 1371 | GCAUUGCCAGCUCUUCCAA | 1125 | 1371 | GCAUUGCCAGCUCUUCCAA | 1125 | 1389 | UUGGAAGAGCUGGCAAUGC | 1208 |
| 1389 | AUCUCCAUCACCUUUGGGC | 1126 | 1389 | AUCUCCAUCACCUUUGGGC | 1126 | 1407 | GCCCAAAGGUGAUGGAGAU | 1209 |
| 1407 | CUUGUUUUCUACUUUGCCA | 1127 | 1407 | CUUGUUUUCUACUUUGCCA | 1127 | 1425 | UGGCAAAGUAGAAAACAAG | 1210 |
| 1425 | ACAGAUUAUCUUGUACAGC | 1128 | 1425 | ACAGAUUAUCUUGUACAGC | 1128 | 1443 | GCUGUACAAGAUAAUCUGU | 1211 |
| 1443 | CCUUUUAUGGACCAAUUAG | 1129 | 1443 | CCUUUUAUGGACCAAUUAG | 1129 | 1461 | CUAAUUGGUCCAUAAAAGG | 1212 |
| 1461 | GCAUUCCAUCAAUUUUAUA | 1130 | 1461 | GCAUUCCAUCAAUUUUAUA | 1130 | 1479 | UAUAAAAUUGAUGGAAUGC | 1213 |
| 1464 | UUCCAUCAAUUUUAUAUCU | 1131 | 1464 | UUCCAUCAAUUUUAUAUCU | 1131 | 1482 | AGAUAUAAAAUUGAUGGAA | 1214 |

PSEN2 NM_000447

| | | |
|---|---|---|
| Seq | Seq | Seq |

| | | | | | | | | |
|---|---|---|---|---|---|---|---|---|
| Pos | Seq | ID | UPos | Upper seq | ID | LPos | Lower seq | ID |

| | | | | | | | | |
|---|---|---|---|---|---|---|---|---|
| 3 | AGCGGCGGCGGAGCAGGCA | 1215 | 3 | AGCGGCGGCGGAGCAGGCA | 1215 | 21 | UGCCUGCUCCGCCGCCGCU | 1339 |
| 21 | AUUUCCAGCAGUGAGGAGA | 1216 | 21 | AUUUCCAGCAGUGAGGAGA | 1216 | 39 | UCUCCUCACUGCUGGAAAU | 1340 |
| 39 | ACAGCCAGAAGCAAGCUAU | 1217 | 39 | ACAGCCAGAAGCAAGCUAU | 1217 | 57 | AUAGCUUGCUUCUGGCUGU | 1341 |
| 57 | UUGGAGCUGAAGGAACCUG | 1218 | 57 | UUGGAGCUGAAGGAACCUG | 1218 | 75 | CAGGUUCCUUCAGCUCCAA | 1342 |
| 75 | GAGACAGAAGCUAGUCCCC | 1219 | 75 | GAGACAGAAGCUAGUCCCC | 1219 | 93 | GGGGACUAGCUUCUGUCUC | 1343 |
| 93 | CCCUCUGAAUUUUACUGAU | 1220 | 93 | CCCUCUGAAUUUUACUGAU | 1220 | 111 | AUCAGUAAAAUUCAGAGGG | 1344 |
| 111 | UGAAGAAACUGAGGCCACA | 1221 | 111 | UGAAGAAACUGAGGCCACA | 1221 | 129 | UGUGGCCUCAGUUUCUUCA | 1345 |
| 129 | AGAGCUAAAGUGACUUUUC | 1222 | 129 | AGAGCUAAAGUGACUUUUC | 1222 | 147 | GAAAAGUCACUUUAGCUCU | 1346 |
| 147 | CCCAAGGUCGCCCAGCGAG | 1223 | 147 | CCCAAGGUCGCCCAGCGAG | 1223 | 165 | CUCGCUGGGCGACCUUGGG | 1347 |
| 165 | GGACGUGGGACUUCUCAGA | 1224 | 165 | GGACGUGGGACUUCUCAGA | 1224 | 183 | UCUGAGAAGUCCCACGUCC | 1348 |
| 183 | ACGUCAGGAGAGUGAUGUG | 1225 | 183 | ACGUCAGGAGAGUGAUGUG | 1225 | 201 | CACAUCACUCUCCUGACGU | 1349 |
| 201 | GAGGGAGCUGUGUGACCAU | 1226 | 201 | GAGGGAGCUGUGUGACCAU | 1226 | 219 | AUGGUCACACAGCUCCCUC | 1350 |
| 219 | UAGAAAGUGACGUGUUAAA | 1227 | 219 | UAGAAAGUGACGUGUUAAA | 1227 | 237 | UUUAACACGUCACUUUCUA | 1351 |
| 237 | AAACCAGCGCUGCCCUCUU | 1228 | 237 | AAACCAGCGCUGCCCUCUU | 1228 | 255 | AAGAGGGCAGCGCUGGUUU | 1352 |
| 255 | UUGAAAGCCAGGGAGCAUC | 1229 | 255 | UUGAAAGCCAGGGAGCAUC | 1229 | 273 | GAUGCUCCCUGGCUUUCAA | 1353 |
| 273 | CAUUCAUUUAGCCUGCUGA | 1230 | 273 | CAUUCAUUUAGCCUGCUGA | 1230 | 291 | UCAGCAGGCUAAAUGAAUG | 1354 |
| 291 | AGAAGAAGAAACCAAGUGU | 1231 | 291 | AGAAGAAGAAACCAAGUGU | 1231 | 309 | ACACUUGGUUUCUUCUUCU | 1355 |
| 309 | UCCGGGAUUCAGACCUCUC | 1232 | 309 | UCCGGGAUUCAGACCUCUC | 1232 | 327 | GAGAGGUCUGAAUCCCGGA | 1356 |
| 327 | CUGCGGCCCCAAGUGUUCG | 1233 | 327 | CUGCGGCCCCAAGUGUUCG | 1233 | 345 | CGAACACUUGGGGCCGCAG | 1357 |
| 345 | GUGGUGCUUCCAGAGGCAG | 1234 | 345 | GUGGUGCUUCCAGAGGCAG | 1234 | 363 | CUGCCUCUGGAAGCACCAC | 1358 |
| 363 | GGGCUAUGCUCACAUUCAU | 1235 | 363 | GGGCUAUGCUCACAUUCAU | 1235 | 381 | AUGAAUGUGAGCAUAGCCC | 1359 |
| 381 | UGGCCUCUGACAGCGAGGA | 1236 | 381 | UGGCCUCUGACAGCGAGGA | 1236 | 399 | UCCUCGCUGUCAGAGGCCA | 1360 |
| 399 | AAGAAGUGUGUGAUGAGCG | 1237 | 399 | AAGAAGUGUGUGAUGAGCG | 1237 | 417 | CGCUCAUCACACACUUCUU | 1361 |
| 417 | GGACGUCCCUAAUGUCGGC | 1238 | 417 | GGACGUCCCUAAUGUCGGC | 1238 | 435 | GCCGACAUUAGGGACGUCC | 1362 |
| 435 | CCGAGAGCCCCACGCCGCG | 1239 | 435 | CCGAGAGCCCCACGCCGCG | 1239 | 453 | CGCGGCGUGGGGCUCUCGG | 1363 |
| 453 | GCUCCUGCCAGGAGGGCAG | 1240 | 453 | GCUCCUGCCAGGAGGGCAG | 1240 | 471 | CUGCCCUCCUGGCAGGAGC | 1364 |
| 471 | GGCAGGGCCCAGAGGAUGG | 1241 | 471 | GGCAGGGCCCAGAGGAUGG | 1241 | 489 | CCAUCCUCUGGGCCCUGCC | 1365 |
| 489 | GAGAGAACACUGCCCAGUG | 1242 | 489 | GAGAGAACACUGCCCAGUG | 1242 | 507 | CACUGGGCAGUGUUCUCUC | 1366 |
| 507 | GGAGAAGCCAGGAGAACGA | 1243 | 507 | GGAGAAGCCAGGAGAACGA | 1243 | 525 | UCGUUCUCCUGGCUUCUCC | 1367 |
| 525 | AGGAGGACGGUGAGGAGGA | 1244 | 525 | AGGAGGACGGUGAGGAGGA | 1244 | 543 | UCCUCCUCACCGUCCUCCU | 1368 |
| 543 | ACCCUGACCGCUAUGUCUG | 1245 | 543 | ACCCUGACCGCUAUGUCUG | 1245 | 561 | CAGACAUAGCGGUCAGGGU | 1369 |
| 561 | GUAGUGGGGUUCCCGGGCG | 1246 | 561 | GUAGUGGGGUUCCCGGGCG | 1246 | 579 | CGCCCGGGAACCCCACUAC | 1370 |
| 579 | GGCCGCCAGGCCUGGAGGA | 1247 | 579 | GGCCGCCAGGCCUGGAGGA | 1247 | 597 | UCCUCCAGGCCUGGCGGCC | 1371 |
| 597 | AAGAGCUGACCCUCAAAUA | 1248 | 597 | AAGAGCUGACCCUCAAAUA | 1248 | 615 | UAUUUGAGGGUCAGCUCUU | 1372 |
| 615 | ACGGAGCGAAGCACGUGAU | 1249 | 615 | ACGGAGCGAAGCACGUGAU | 1249 | 633 | AUCACGUGCUUCGCUCCGU | 1373 |
| 633 | UCAUGCUGUUUGUGCCUGU | 1250 | 633 | UCAUGCUGUUUGUGCCUGU | 1250 | 651 | ACAGGCACAAACAGCAUGA | 1374 |
| 651 | UCACUCUGUGCAUGAUCGU | 1251 | 651 | UCACUCUGUGCAUGAUCGU | 1251 | 669 | ACGAUCAUGCACAGAGUGA | 1375 |
| 669 | UGGUGGUAGCCACCAUCAA | 1252 | 669 | UGGUGGUAGCCACCAUCAA | 1252 | 687 | UUGAUGGUGGCUACCACCA | 1376 |
| 687 | AGUCUGUGCGCUUCUACAC | 1253 | 687 | AGUCUGUGCGCUUCUACAC | 1253 | 705 | GUGUAGAAGCGCACAGACU | 1377 |
| 705 | CAGAGAAGAAUGGACAGCU | 1254 | 705 | CAGAGAAGAAUGGACAGCU | 1254 | 723 | AGCUGUCCAUUCUUCUCUG | 1378 |
| 723 | UCAUCUACACGACAUUCAC | 1255 | 723 | UCAUCUACACGACAUUCAC | 1255 | 741 | GUGAAUGUCGUGUAGAUGA | 1379 |
| 741 | CUGAGGACACACCCUCGGU | 1256 | 741 | CUGAGGACACACCCUCGGU | 1256 | 759 | ACCGAGGGUGUGUCCUCAG | 1380 |
| 759 | UGGGCCAGCGCCUCCUCAA | 1257 | 759 | UGGGCCAGCGCCUCCUCAA | 1257 | 777 | UUGAGGAGGCGCUGGCCCA | 1381 |
| 777 | ACUCCGUGCUGAACACCCU | 1258 | 777 | ACUCCGUGCUGAACACCCU | 1258 | 795 | AGGGUGUUCAGCACGGAGU | 1382 |
| 795 | UCAUCAUGAUCAGCGUCAU | 1259 | 795 | UCAUCAUGAUCAGCGUCAU | 1259 | 813 | AUGACGCUGAUCAUGAUGA | 1383 |
| 813 | UCGUGGUUAUGACCAUCUU | 1260 | 813 | UCGUGGUUAUGACCAUCUU | 1260 | 831 | AAGAUGGUCAUAACCACGA | 1384 |
| 831 | UCUUGGUGGUGCUCUACAA | 1261 | 831 | UCUUGGUGGUGCUCUACAA | 1261 | 849 | UUGUAGAGCACCACCAAGA | 1385 |
| 849 | AGUACCGCUGCUACAAGUU | 1262 | 849 | AGUACCGCUGCUACAAGUU | 1262 | 867 | AACUUGUAGCAGCGGUACU | 1386 |
| 867 | UCAUCCAUGGCUGGUUGAU | 1263 | 867 | UCAUCCAUGGCUGGUUGAU | 1263 | 885 | AUCAACCAGCCAUGGAUGA | 1387 |
| 885 | UCAUGUCUUCACUGAUGCU | 1264 | 885 | UCAUGUCUUCACUGAUGCU | 1264 | 903 | AGCAUCAGUGAAGACAUGA | 1388 |
| 903 | UGCUGUUCCUCUUCACCUA | 1265 | 903 | UGCUGUUCCUCUUCACCUA | 1265 | 921 | UAGGUGAAGAGGAACAGCA | 1389 |
| 921 | AUAUCUACCUUGGGGAAGU | 1266 | 921 | AUAUCUACCUUGGGGAAGU | 1266 | 939 | ACUUCCCCAAGGUAGAUAU | 1390 |
| 939 | UGCUCAAGACCUACAAUGU | 1267 | 939 | UGCUCAAGACCUACAAUGU | 1267 | 957 | ACAUUGUAGGUCUUGAGCA | 1391 |
| 957 | UGGCCAUGGACUACCCCAC | 1268 | 957 | UGGCCAUGGACUACCCCAC | 1268 | 975 | GUGGGGUAGUCCAUGGCCA | 1392 |
| 975 | CCCUCUUGCUGACUGUCUG | 1269 | 975 | CCCUCUUGCUGACUGUCUG | 1269 | 993 | CAGACAGUCAGCAAGAGGG | 1393 |
| 993 | GGAACUUCGGGGCAGUGGG | 1270 | 993 | GGAACUUCGGGGCAGUGGG | 1270 | 1011 | CCCACUGCCCCGAAGUUCC | 1394 |
| 1011 | GCAUGGUGUGCAUCCACUG | 1271 | 1011 | GCAUGGUGUGCAUCCACUG | 1271 | 1029 | CAGUGGAUGCACACCAUGC | 1395 |
| 1029 | GGAAGGGCCCUCUGGUGCU | 1272 | 1029 | GGAAGGGCCCUCUGGUGCU | 1272 | 1047 | AGCACCAGAGGGCCCUUCC | 1396 |
| 1047 | UGCAGCAGGCCUACCUCAU | 1273 | 1047 | UGCAGCAGGCCUACCUCAU | 1273 | 1065 | AUGAGGUAGGCCUGCUGCA | 1397 |
| 1065 | UCAUGAUCAGUGCGCUCAU | 1274 | 1065 | UCAUGAUCAGUGCGCUCAU | 1274 | 1083 | AUGAGCGCACUGAUCAUGA | 1398 |
| 1083 | UGGCCCUAGUGUUCAUCAA | 1275 | 1083 | UGGCCCUAGUGUUCAUCAA | 1275 | 1101 | UUGAUGAACACUAGGGCCA | 1399 |
| 1101 | AGUACCUCCCAGAGUGGUC | 1276 | 1101 | AGUACCUCCCAGAGUGGUC | 1276 | 1119 | GACCACUCUGGGAGGUACU | 1400 |
| 1119 | CCGCGUGGGUCAUCCUGGG | 1277 | 1119 | CCGCGUGGGUCAUCCUGGG | 1277 | 1137 | CCCAGGAUGACCCACGCGG | 1401 |
| 1137 | GCGCCAUCUCUGUGUAUGA | 1278 | 1137 | GCGCCAUCUCUGUGUAUGA | 1278 | 1155 | UCAUACACAGAGAUGGCGC | 1402 |
| 1155 | AUCUCGUGGCUGUGCUGUG | 1279 | 1155 | AUCUCGUGGCUGUGCUGUG | 1279 | 1173 | CACAGCACAGCCACGAGAU | 1403 |
| 1173 | GUCCCAAAGGGCCUCUGAG | 1280 | 1173 | GUCCCAAAGGGCCUCUGAG | 1280 | 1191 | CUCAGAGGCCCUUUGGGAC | 1404 |
| 1191 | GAAUGCUGGUAGAAACUGC | 1281 | 1191 | GAAUGCUGGUAGAAACUGC | 1281 | 1209 | GCAGUUUCUACCAGCAUUC | 1405 |
| 1209 | CCCAGGAGAGAAAUGAGCC | 1282 | 1209 | CCCAGGAGAGAAAUGAGCC | 1282 | 1227 | GGCUCAUUUCUCUCCUGGG | 1406 |
| 1227 | CCAUAUUCCCUGCCCUGAU | 1283 | 1227 | CCAUAUUCCCUGCCCUGAU | 1283 | 1245 | AUCAGGGCAGGGAAUAUGG | 1407 |
| 1245 | UAUACUCAUCUGCCAUGGU | 1284 | 1245 | UAUACUCAUCUGCCAUGGU | 1284 | 1263 | ACCAUGGCAGAUGAGUAUA | 1408 |
| 1263 | UGUGGACGGUUGGCAUGGC | 1285 | 1263 | UGUGGACGGUUGGCAUGGC | 1285 | 1281 | GCCAUGCCAACCGUCCACA | 1409 |
| 1281 | CGAAGCUGGACCCCUCCUC | 1286 | 1281 | CGAAGCUGGACCCCUCCUC | 1286 | 1299 | GAGGAGGGGUCCAGCUUCG | 1410 |
| 1299 | CUCAGGGUGCCCUCCAGCU | 1287 | 1299 | CUCAGGGUGCCCUCCAGCU | 1287 | 1317 | AGCUGGAGGGCACCCUGAG | 1411 |
| 1317 | UCCCCUACGACCCGGAGAU | 1288 | 1317 | UCCCCUACGACCCGGAGAU | 1288 | 1335 | AUCUCCGGGUCGUAGGGGA | 1412 |
| 1335 | UGGAAGAAGACUCCUAUGA | 1289 | 1335 | UGGAAGAAGACUCCUAUGA | 1289 | 1353 | UCAUAGGAGUCUUCUUCCA | 1413 |
| 1353 | ACAGUUUUGGGGAGCCUUC | 1290 | 1353 | ACAGUUUUGGGGAGCCUUC | 1290 | 1371 | GAAGGCUCCCCAAAACUGU | 1414 |
| 1371 | CAUACCCCGAAGUCUUUGA | 1291 | 1371 | CAUACCCCGAAGUCUUUGA | 1291 | 1389 | UCAAAGACUUCGGGGUAUG | 1415 |
| 1389 | AGCCUCCCUUGACUGGCUA | 1292 | 1389 | AGCCUCCCUUGACUGGCUA | 1292 | 1407 | UAGCCAGUCAAGGGAGGCU | 1416 |
| 1407 | ACCCAGGGGAGGAGCUGGA | 1293 | 1407 | ACCCAGGGGAGGAGCUGGA | 1293 | 1425 | UCCAGCUCCUCCCCUGGGU | 1417 |
| 1425 | AGGAAGAGGAGGAAAGGGG | 1294 | 1425 | AGGAAGAGGAGGAAAGGGG | 1294 | 1443 | CCCCUUUCCUCCUCUUCCU | 1418 |
| 1443 | GCGUGAAGCUUGGCCUCGG | 1295 | 1443 | GCGUGAAGCUUGGCCUCGG | 1295 | 1461 | CCGAGGCCAAGCUUCACGC | 1419 |
| 1461 | GGGACUUCAUCUUCUACAG | 1296 | 1461 | GGGACUUCAUCUUCUACAG | 1296 | 1479 | CUGUAGAAGAUGAAGUCCC | 1420 |
| 1479 | GUGUGCUGGUGGGCAAGGC | 1297 | 1479 | GUGUGCUGGUGGGCAAGGC | 1297 | 1497 | GCCUUGCCCACCAGCACAC | 1421 |
| 1497 | CGGCUGCCACGGGCAGCGG | 1298 | 1497 | CGGCUGCCACGGGCAGCGG | 1298 | 1515 | CCGCUGCCCGUGGCAGCCG | 1422 |
| 1515 | GGGACUGGAAUACCACGCU | 1299 | 1515 | GGGACUGGAAUACCACGCU | 1299 | 1533 | AGCGUGGUAUUCCAGUCCC | 1423 |
| 1533 | UGGCCUGCUUCGUGGCCAU | 1300 | 1533 | UGGCCUGCUUCGUGGCCAU | 1300 | 1551 | AUGGCCACGAAGCAGGCCA | 1424 |
| 1551 | UCCUCAUUGGCUUGUGUCU | 1301 | 1551 | UCCUCAUUGGCUUGUGUCU | 1301 | 1569 | AGACACAAGCCAAUGAGGA | 1425 |
| 1569 | UGACCCUCCUGCUGCUUGC | 1302 | 1569 | UGACCCUCCUGCUGCUUGC | 1302 | 1587 | GCAAGCAGCAGGAGGGUCA | 1426 |
| 1587 | CUGUGUUCAAGAAGGCGCU | 1303 | 1587 | CUGUGUUCAAGAAGGCGCU | 1303 | 1605 | AGCGCCUUCUUGAACACAG | 1427 |
| 1605 | UGCCCGCCCUCCCCAUCUC | 1304 | 1605 | UGCCCGCCCUCCCCAUCUC | 1304 | 1623 | GAGAUGGGGAGGGCGGGCA | 1428 |
| 1623 | CCAUCACGUUCGGGCUCAU | 1305 | 1623 | CCAUCACGUUCGGGCUCAU | 1305 | 1641 | AUGAGCCCGAACGUGAUGG | 1429 |
| 1641 | UCUUUUACUUCUCCACGGA | 1306 | 1641 | UCUUUUACUUCUCCACGGA | 1306 | 1659 | UCCGUGGAGAAGUAAAAGA | 1430 |
| 1659 | ACAACCUGGUGCGGCCGUU | 1307 | 1659 | ACAACCUGGUGCGGCCGUU | 1307 | 1677 | AACGGCCGCACCAGGUUGU | 1431 |
| 1677 | UCAUGGACACCCUGGCCUC | 1308 | 1677 | UCAUGGACACCCUGGCCUC | 1308 | 1695 | GAGGCCAGGGUGUCCAUGA | 1432 |
| 1695 | CCCAUCAGCUCUACAUCUG | 1309 | 1695 | CCCAUCAGCUCUACAUCUG | 1309 | 1713 | CAGAUGUAGAGCUGAUGGG | 1433 |
| 1713 | GAGGGACAUGGUGUGCCAC | 1310 | 1713 | GAGGGACAUGGUGUGCCAC | 1310 | 1731 | GUGGCACACCAUGUCCCUC | 1434 |
| 1731 | CAGGCUGCAAGCUGCAGGG | 1311 | 1731 | CAGGCUGCAAGCUGCAGGG | 1311 | 1749 | CCCUGCAGCUUGCAGCCUG | 1435 |
| 1749 | GAAUUUUCAUUGGAUGCAG | 1312 | 1749 | GAAUUUUCAUUGGAUGCAG | 1312 | 1767 | CUGCAUCCAAUGAAAAUUC | 1436 |
| 1767 | GUUGUAUAGUUUUACACUC | 1313 | 1767 | GUUGUAUAGUUUUACACUC | 1313 | 1785 | GAGUGUAAAACUAUACAAC | 1437 |
| 1785 | CUAGUGCCAUAUAUUUUUA | 1314 | 1785 | CUAGUGCCAUAUAUUUUUA | 1314 | 1803 | UAAAAAUAUAUGGCACUAG | 1438 |
| 1803 | AAGACUUUUCUUUCCUUAA | 1315 | 1803 | AAGACUUUUCUUUCCUUAA | 1315 | 1821 | UUAAGGAAAGAAAAGUCUU | 1439 |
| 1821 | AAAAAUAAAGUACGUGUUU | 1316 | 1821 | AAAAAUAAAGUACGUGUUU | 1316 | 1839 | AAACACGUACUUUAUUUUU | 1440 |
| 1839 | UACUUGGUGAGGAGGAGGC | 1317 | 1839 | UACUUGGUGAGGAGGAGGC | 1317 | 1857 | GCCUCCUCCUCACCAAGUA | 1441 |
| 1857 | CAGAACCAGCUCUUUGGUG | 1318 | 1857 | CAGAACCAGCUCUUUGGUG | 1318 | 1875 | CACCAAAGAGCUGGUUCUG | 1442 |
| 1875 | GCCAGCUGUUUCAUCACCA | 1319 | 1875 | GCCAGCUGUUUCAUCACCA | 1319 | 1893 | UGGUGAUGAAACAGCUGGC | 1443 |
| 1893 | AGACUUUGGCUCCCGCUUU | 1320 | 1893 | AGACUUUGGCUCCCGCUUU | 1320 | 1911 | AAAGCGGGAGCCAAAGUCU | 1444 |
| 1911 | UGGGGAGCGCCUCGCUUCA | 1321 | 1911 | UGGGGAGCGCCUCGCUUCA | 1321 | 1929 | UGAAGCGAGGCGCUCCCCA | 1445 |
| 1929 | ACGGACAGGAAGCACAGCA | 1322 | 1929 | ACGGACAGGAAGCACAGCA | 1322 | 1947 | UGCUGUGCUUCCUGUCCGU | 1446 |
| 1947 | AGGUUUAUCCAGAUGAACU | 1323 | 1947 | AGGUUUAUCCAGAUGAACU | 1323 | 1965 | AGUUCAUCUGGAUAAACCU | 1447 |
| 1965 | UGAGAAGGUCAGAUUAGGG | 1324 | 1965 | UGAGAAGGUCAGAUUAGGG | 1324 | 1983 | CCCUAAUCUGACCUUCUCA | 1448 |
| 1983 | GCGGGGAGAAGAGCAUCCG | 1325 | 1983 | GCGGGGAGAAGAGCAUCCG | 1325 | 2001 | CGGAUGCUCUUCUCCCCGC | 1449 |
| 2001 | GGCAUGAGGGCUGAGAUGC | 1326 | 2001 | GGCAUGAGGGCUGAGAUGC | 1326 | 2019 | GCAUCUCAGCCCUCAUGCC | 1450 |
| 2019 | CGCAAAGAGUGUGCUCGGG | 1327 | 2019 | CGCAAAGAGUGUGCUCGGG | 1327 | 2037 | CCCGAGCACACUCUUUGCG | 1451 |
| 2037 | GAGUGGCCCCUGGCACCUG | 1328 | 2037 | GAGUGGCCCCUGGCACCUG | 1328 | 2055 | CAGGUGCCAGGGGCCACUC | 1452 |
| 2055 | GGGUGCUCUGGCUGGAGAG | 1329 | 2055 | GGGUGCUCUGGCUGGAGAG | 1329 | 2073 | CUCUCCAGCCAGAGCACCC | 1453 |
| 2073 | GGAAAAGCCAGUUCCCUAC | 1330 | 2073 | GGAAAAGCCAGUUCCCUAC | 1330 | 2091 | GUAGGGAACUGGCUUUUCC | 1454 |
| 2091 | CGAGGAGUGUUCCCAAUGC | 1331 | 2091 | CGAGGAGUGUUCCCAAUGC | 1331 | 2109 | GCAUUGGGAACACUCCUCG | 1455 |
| 2109 | CUUUGUCCAUGAUGUCCUU | 1332 | 2109 | CUUUGUCCAUGAUGUCCUU | 1332 | 2127 | AAGGACAUCAUGGACAAAG | 1456 |
| 2127 | UGUUAUUUUAUUGCCUUUA | 1333 | 2127 | UGUUAUUUUAUUGCCUUUA | 1333 | 2145 | UAAAGGCAAUAAAAUAACA | 1457 |
| 2145 | AGAAACUGAGUCCUGUUCU | 1334 | 2145 | AGAAACUGAGUCCUGUUCU | 1334 | 2163 | AGAACAGGACUCAGUUUCU | 1458 |
| 2163 | UUGUUACGGCAGUCACACU | 1335 | 2163 | UUGUUACGGCAGUCACACU | 1335 | 2181 | AGUGUGACUGCCGUAACAA | 1459 |
| 2181 | UGCUGGGAAGUGGCUUAAU | 1336 | 2181 | UGCUGGGAAGUGGCUUAAU | 1336 | 2199 | AUUAAGCCACUUCCCAGCA | 1460 |
| 2199 | UAGUAAUAUCAAUAAAUAG | 1337 | 2199 | UAGUAAUAUCAAUAAAUAG | 1337 | 2217 | CUAUUUAUUGAUAUUACUA | 1461 |
| 2216 | AGAUGAGUCCUGUUAGAAA | 1338 | 2216 | AGAUGAGUCCUGUUAGAAA | 1338 | 2234 | UUUCUAACAGGACUCAUCU | 1462 |

[0421] The 3′-ends of the Upper sequence and the Lower sequence of the siNA construct can include an overhang sequence, for example about 1, 2, 3, or 4 nucleotides in length, preferably 2 nucleotides in length, wherein the overhanging sequence of the lower sequence is optionally complementary to a portion of the target sequence. The upper sequence is also referred to as the sense strand, whereas the lower sequence is also referred to as the antisense strand. The upper and lower sequences in the Table can further comprise a chemical modification having Formulae I-VII or any combination thereof.

TABLE III
APP, BACE, PSEN1, PSEN2, SYNTHETIC MODIFIED siNA CONSTRUCTS

APP

| | | | |
|---|---|---|---|
| Target | Seq | Cmpd | Seq |

| | | | | | | |
|---|---|---|---|---|---|---|
| Pos | Target | ID | # | Aliases | Sequence | ID |

| | | | | | | |
|---|---|---|---|---|---|---|
| 791 | CAGACUAUGCAGAUGGGAGUGAA | 1463 | | APP:793U21 sense siNA | GACUAUGCAGAUGGGAGUGTT | 1495 |
| 829 | GUAGCAGAGGAGGAAGAAGUGGC | 1464 | | APP:831U21 sense siNA | AGCAGAGGAGGAAGAAGUGTT | 1496 |
| 851 | CUGAGGUGGAAGAAGAAGAAGCC | 1465 | | APP:853U21 sense siNA | GAGGUGGAAGAAGAAGAAGTT | 1497 |
| 1356 | AGAGAGAAUGUCCCAGGUCAUGA | 1466 | | APP:1358U21 sense siNA | AGAGAAUGUCCCAGGUCAUTT | 1498 |
| 1568 | AGAACUACAUCACCGCUCUGCAG | 1467 | | APP:1570U21 sense siNA | AACUACAUCACCGCUCUGCTT | 1499 |
| 2012 | AUUCUUUUGGGGCUGACUCUGUG | 1468 | | APP:2014U21 sense siNA | UCUUUUGGGGCUGACUCUGTT | 1500 |
| 2481 | UGAAGUUGGACAGCAAAACCAUU | 1469 | | APP:2483U21 sense siNA | AAGUUGGACAGCAAAACCATT | 1501 |
| 2482 | GAAGUUGGACAGCAAAACCAUUG | 1470 | | APP:2484U21 sense siNA | AGUUGGACAGCAAAACCAUTT | 1502 |
| 791 | CAGACUAUGCAGAUGGGAGUGAA | 1463 | | APP:811L21 antisense siNA | CACUCCCAUCUGCAUAGUCTT | 1503 |
| | | | | (793C) | | |
| 829 | GUAGCAGAGGAGGAAGAAGUGGC | 1464 | | APP:849L21 antisense siNA | CACUUCUUCCUCCUCUGCUTT | 1504 |
| | | | | (831C) | | |
| 851 | CUGAGGUGGAAGAAGAAGAAGCC | 1465 | | APP:871L21 antisense siNA | CUUCUUCUUCUUCCACCUCTT | 1505 |
| | | | | (853C) | | |
| 1356 | AGAGAGAAUGUCCCAGGUCAUGA | 1466 | | APP:1376L21 antisense siNA | AUGACCUGGGACAUUCUCUTT | 1506 |
| | | | | (1358C) | | |
| 1568 | AGAACUACAUCACCGCUCUGCAG | 1467 | | APP:1588L21 antisense siNA | GCAGAGCGGUGAUGUAGUUTT | 1507 |
| | | | | (157CC) | | |
| 2012 | AUUCUUUUGGGGCUGACUCUGUG | 1468 | | APP:2032L21 antisense siNA | CAGAGUCAGCCCCAAAAGATT | 1508 |
| | | | | (2014C) | | |
| 2481 | UGAAGUUGGACAGCAAAACCAUU | 1469 | | APP:2501L21 antisense siNA | UGGUUUUGCUGUCCAACUUTT | 1509 |
| | | | | (2483C) | | |
| 2482 | GAAGUUGGACAGCAAAACCAUUG | 1470 | | APP:2502L21 antisense siNA | AUGGUUUUGCUGUCCAACUTT | 1510 |
| | | | | (2484C) | | |
| 791 | CAGACUAUGCAGAUGGGAGUGAA | 1463 | | APP:793U21 sense siNA stab04 | B GAcuAuGcAGAuGGGAGuGTT B | 1511 |
| 829 | GUAGCAGAGGAGGAAGAAGUGGC | 1464 | | APP:831U21 sense siNA stab04 | B AGcAGAGGAGGAAGAAGuGTT B | 1512 |
| 851 | CUGAGGUGGAAGAAGAAGAAGCC | 1465 | | APP:853U21 sense siNA stab04 | B GAGGuGGAAGAAGAAGAAGTT B | 1513 |
| 1356 | AGAGAGAAUGUCCCAGGUCAUGA | 1466 | | APP:1358U21 sense siNA stab04 | B AGAGAAuGucccAGGucAuTT B | 1514 |
| 1568 | AGAACUACAUCACCGCUCUGCAG | 1467 | | APP:1570U21 sense siNA stab04 | B AAcuAcAucAccGcucuGcTT B | 1515 |
| 2012 | AUUCUUUUGGGGCUGACUCUGUG | 1468 | | APP:2014U21 sense siNA stab04 | B ucuuuuGGGGcuGAcucuGTT B | 1516 |
| 2481 | UGAAGUUGGACAGCAAAACCAUU | 1469 | | APP:2483U21 sense siNA stab04 | B AAGuuGGAcAGcAAAAccATT B | 1517 |
| 2482 | GAAGUUGGACAGCAAAACCAUUG | 1470 | | APP:2484U21 sense siNA stab04 | B AGuuGGAcAGcAAAAccAuTT B | 1518 |
| 791 | CAGACUAUGCAGAUGGGAGUGAA | 1463 | | APP:811L21 antisense siNA (793C) | cAcucccAucuGcAuAGucTsT | 1519 |
| | | | | stab05 | | |
| 829 | GUAGCAGAGGAGGAAGAAGUGGC | 1464 | | APP:849L21 antisense siNA (831C) | cAcuucuuccuccucuGcuTsT | 1520 |
| | | | | stab05 | | |
| 851 | CUGAGGUGGAAGAAGAAGAAGCC | 1465 | | APP:871L21 antisense siNA (853C) | cuucuucuucuuccAccucTsT | 1521 |
| | | | | stab05 | | |
| 1356 | AGAGAGAAUGUCCCAGGUCAUGA | 1466 | | APP:1376L21 antisense siNA | AuGAccuGGGAcAuucucuTsT | 1522 |
| | | | | (1358C) stab05 | | |
| 1568 | AGAACUACAUCACCGCUCUGCAG | 1467 | | APP:1588L21 antisense siNA | GcAGAGcGGuGAuGuAGuuTsT | 1523 |
| | | | | (1570C) stab05 | | |
| 2012 | AUUCUUUUGGGGCUGACUCUGUG | 1468 | | APP:2032L21 antisense siNA | cAGAGucAGccccAAAAGATsT | 1524 |
| | | | | (2014C) stab05 | | |
| 2481 | UGAAGUUGGACAGCAAAACCAUU | 1469 | | APP:2501L21 antisense siNA | uGGuuuuGcuGuccAAcuuTsT | 1525 |
| | | | | (2483C) stab05 | | |
| 2482 | GAAGUUGGACAGCAAAACCAUUG | 1470 | | APP:2502L21 antisense siNA | AuGGuuuuGcuGuccAAcuTsT | 1526 |
| | | | | (2484C) stab05 | | |
| 791 | CAGACUAUGCAGAUGGGAGUGAA | 1463 | | APP:793U21 sense siNA stab07 | B GAcuAuGcAGAuGGGAGuGTT B | 1527 |
| 829 | GUAGCAGAGGAGGAAGAAGUGGC | 1464 | | APP:831U21 sense siNA stab07 | B AGcAGAGGAGGAAGAAGuGTT B | 1528 |
| 851 | CUGAGGUGGAAGAAGAAGAAGCC | 1465 | | APP:853U21 sense siNA stab07 | B GAGGuGGAAGAAGAAGAAGTT B | 1529 |
| 1356 | AGAGAGAAUGUCCCAGGUCAUGA | 1466 | | APP:1358U21 sense siNA stab07 | B AGAGAAuGucccAGGucAuTT B | 1530 |
| 1568 | AGAACUACAUCACCGCUCUGCAG | 1467 | | APP:1570U21 sense siNA stab07 | B AAcuAcAucAccGcucuGcTT B | 1531 |
| 2012 | AUUCUUUUGGGGCUGACUCUGUG | 1468 | | APP:2014U21 sense siNA stab07 | B ucuuuuGGGGcuGAcucuGTT B | 1532 |
| 2481 | UGAAGUUGGACAGCAAAACCAUU | 1469 | | APP:2483U21 sense siNA stab07 | B AAGuuGGAcAGcAAAAccATT B | 1533 |
| 2482 | GAAGUUGGACAGCAAAACCAUUG | 1470 | | APP:2484U21 sense siNA stab07 | B AGuuGGAcAGcAAAAccAuTT B | 1534 |
| 791 | CAGACUAUGCAGAUGGGAGUGAA | 1463 | | APP:811L21 antisense siNA | cAcucccAucuGcAuAGucTsT | 1535 |
| | | | | (793C) stab11 | | |
| 829 | GUAGCAGAGGAGGAAGAAGUGGC | 1464 | | APP:849L21 antisense siNA | cAcuucuuccuccucuGcuTsT | 1536 |
| | | | | (831C) stab11 | | |
| 851 | CUGAGGUGGAAGAAGAAGAAGCC | 1465 | | APP:871L21 antisense siNA | cuucuucuucuuccAccucTsT | 1537 |
| | | | | (853C) stab11 | | |
| 1356 | AGAGAGAAUGUCCCAGGUCAUGA | 1466 | | APP:1376L21 antisense siNA | AuGAccuGGGAcAuucucuTsT | 1538 |
| | | | | (1358C) stab11 | | |
| 1568 | AGAACUACAUCACCGCUCUGCAG | 1467 | | APP:1588L21 antisense siNA | GcAGAGcGGuGAuGuAGuuTsT | 1539 |
| | | | | (1570C) stab11 | | |
| 2012 | AUUCUUUUGGGGCUGACUCUGUG | 1468 | | APP:2032L21 antisense siNA | cAGAGucAGccccAAAAGATsT | 1540 |
| | | | | (2014C) stab11 | | |
| 2481 | UGAAGUUGGACAGCAAAACCAUU | 1469 | | APP:2501L21 antisense siNA | uGGuuuuGcuGuccAAcuuTsT | 1541 |
| | | | | (2483C) stab11 | | |
| 2482 | GAAGUUGGACAGCAAAACCAUUG | 1470 | | APP:2502L21 antisense siNA | AuGGuuuuGcuGuccAAcuTsT | 1542 |
| | | | | (2484C) stab11 | | |
| 791 | CAGACUAUGCAGAUGGGAGUGAA | 1463 | | APP:793U21 sense siNA stab18 | B GAcuAuGcAGAuGGGAGuGTT B | 1543 |
| 829 | GUAGCAGAGGAGGAAGAAGUGGC | 1464 | | APP:831U21 sense siNA stab18 | B AGcAGAGGAGGAAGAAGuGTT B | 1544 |
| 851 | CUGAGGUGGAAGAAGAAGAAGCC | 1465 | | APP:853U21 sense siNA stab18 | B GAGGuGGAAGAAGAAGAAGTT B | 1545 |
| 1356 | AGAGAGAAUGUCCCAGGUCAUGA | 1466 | | APP:1358U21 sense siNA stab18 | B AGAGAAuGucccAGGucAuTT B | 1546 |
| 1568 | AGAACUACAUCACCGCUCUGCAG | 1467 | | APP:1570U21 sense siNA stab18 | B AAcuAcAucAccGcucuGcTT B | 1547 |
| 2012 | AUUCUUUUGGGGCUGACUCUGUG | 1468 | | APP:2014U21 sense siNA stab18 | B ucuuuuGGGGcuGAcucuGTT B | 1548 |
| 2481 | UGAAGUUGGACAGCAAAACCAUU | 1469 | | APP:2483U21 sense siNA stab18 | B AAGuuGGAcAGcAAAAccATT B | 1549 |
| 2482 | GAAGUUGGACAGCAAAACCAUUG | 1470 | | APP:2484U21 sense siNA stab18 | B AGuuGGAcAGcAAAACCAuTT B | 1550 |
| 791 | CAGACUAUGCAGAUGGGAGUGAA | 1463 | 33885 | APP:811L21 antisense siNA | cAcucccAucuGcAuAGucTsT | 1551 |
| | | | | (793C) stab08 | | |
| 829 | GUAGCAGAGGAGGAAGAAGUGGC | 1464 | 33886 | APP:849L21 antisense siNA | cAcuucuuccuccucuGcuTsT | 1552 |
| | | | | (831C) stab08 | | |
| 851 | CUGAGGUGGAAGAAGAAGAAGCC | 1465 | 33887 | APP:871L21 antisense siNA | cuucuucuucuuccAccucTsT | 1553 |
| | | | | (853C) stab08 | | |
| 1356 | AGAGAGAAUGUCCCAGGUCAUGA | 1466 | 33888 | APP:1376L21 antisense siNA | AuGAccuGGGAcAuucucuTsT | 1554 |
| | | | | (1358C) stab08 | | |
| 1568 | AGAACUACAUCACCGCUCUGCAG | 1467 | 33889 | APP:1588L21 antisense siNA | GcAGAGcGGuGAuGuAGuuTsT | 1555 |
| | | | | (1570C) stab08 | | |
| 2012 | AUUCUUUUGGGGCUGACUCUGUG | 1468 | 33890 | APP:2032L21 antisense siNA | cAGAGucAGccccAAAAGATsT | 1556 |
| | | | | (2014C) stab08 | | |
| 2481 | UGAAGUUGGACAGCAAAACCAUU | 1469 | 33891 | APP:2501L21 antisense siNA | uGGuuuuGcuGuccAAcuuTsT | 1557 |
| | | | | (2483C) stab08 | | |
| 2482 | GAAGUUGGACAGCAAAACCAUUG | 1470 | 33892 | APP:2502L21 antisense siNA | AuGGuuuuGcuGuccAAcuTsT | 1558 |
| | | | | (2484C) stab08 | | |
| 791 | CAGACUAUGCAGAUGGGAGUGAA | 1463 | 33869 | APP:793U21 sense siNA stab09 | B GACUAUGCAGAUGGGAGUGTT B | 1559 |
| 829 | GUAGCAGAGGAGGAAGAAGUGGC | 1464 | 33870 | APP:831U21 sense siNA stab09 | B AGCAGAGGAGGAAGAAGUGTT B | 1560 |
| 851 | CUGAGGUGGAAGAAGAAGAAGCC | 1465 | 33871 | APP:853U21 sense siNA stab09 | B GAGGUGGAAGAAGAAGAAGTT B | 1561 |
| 1356 | AGAGAGAAUGUCCCAGGUCAUGA | 1466 | 33872 | APP:1358U21 sense siNA stab09 | B AGAGAAUGUCCCAGGUCAUTT B | 1562 |
| 1568 | AGAACUACAUCACCGCUCUGCAG | 1467 | 33873 | APP:1570U21 sense siNA stab09 | B AACUACAUCACCGCUCUGCTT B | 1563 |
| 2012 | AUUCUUUUGGGGCUGACUCUGUG | 1468 | 33874 | APP:2014U21 sense siNA stab09 | B UCUUUUGGGGCUGACUCUGTT B | 1564 |
| 2481 | UGAAGUUGGACAGCAAAACCAUU | 1469 | 33875 | APP:2483U21 sense siNA stab09 | B AAGUUGGACAGCAAAACCATT B | 1565 |
| 2482 | GAAGUUGGACAGCAAAACCAUUG | 1470 | 33876 | APP:2484U21 sense siNA stab09 | B AGUUGGACAGCAAAACCAUTT B | 1566 |
| 791 | CAGACUAUGCAGAUGGGAGUGAA | 1463 | 33877 | APP:811L21 antisense siNA | CACUCCCAUCUGCAUAGUCTsT | 1567 |
| | | | | (793C) stab10 | | |
| 829 | GUAGCAGAGGAGGAAGAAGUGGC | 1464 | 33878 | APP:849L21 antisense siNA | CACUUCUUCCUCCUCUGCUTsT | 1568 |
| | | | | (831C) stab10 | | |
| 851 | CUGAGGUGGAAGAAGAAGAAGCC | 1465 | 33879 | APP:871L21 antisense siNA | CUUCUUCUUCUUCCACCUCTsT | 1569 |
| | | | | (853C) stab10 | | |
| 1356 | AGAGAGAAUGUCCCAGGUCAUGA | 1466 | 33880 | APP:1376L21 antisense siNA | AUGACCUGGGACAUUCUCUTsT | 1570 |
| | | | | (1358C) stab10 | | |
| 1568 | AGAACUACAUCACCGCUCUGCAG | 1467 | 33881 | APP:1588L21 antisense siNA | GCAGAGCGGUGAUGUAGUUTsT | 1571 |
| | | | | (1570C) stab10 | | |
| 2012 | AUUCUUUUGGGGCUGACUCUGUG | 1468 | 33882 | APP:2032L21 antisense siNA | CAGAGUCAGCCCCAAAAGATsT | 1572 |
| | | | | (2014C) stab10 | | |
| 2481 | UGAAGUUGGACAGCAAAACCAUU | 1469 | 33883 | APP:2501L21 antisense siNA | UGGUUUUGCUGUCCAACUUTsT | 1573 |
| | | | | (2483C) stab10 | | |
| 2482 | GAAGUUGGACAGCAAAACCAUUG | 1470 | 33884 | APP:2502L21 antisense siNA | AUGGUUUUGCUGUCCAACUTsT | 1574 |
| | | | | (2484C) stab10 | | |
| 791 | CAGACUAUGCAGAUGGGAGUGAA | 1463 | | APP:811L21 antisense siNA | cAcucccAucuGcAuAGucTT B | 1575 |
| | | | | (793C) stab19 | | |
| 829 | GUAGCAGAGGAGGAAGAAGUGGC | 1464 | | APP:849L21 antisense siNA | cAcuucuuccuccucuGcuTT B | 1576 |
| | | | | (831C) stab19 | | |
| 851 | CUGAGGUGGAAGAAGAAGAAGCC | 1465 | | APP:871L21 antisense siNA | cuucuucuucuuccAccucTT B | 1577 |
| | | | | (853C) stab19 | | |
| 1356 | AGAGAGAAUGUCCCAGGUCAUGA | 1466 | | APP:1376L21 antisense siNA | AuGAccuGGGAcAuucucuTT B | 1578 |
| | | | | (1358C) stab19 | | |
| 1568 | AGAACUACAUCACCGCUCUGCAG | 1467 | | APP:1588L21 antisense siNA | GcAGAGcGGuGAuGuAGuuTT B | 1579 |
| | | | | (1570C) stab19 | | |
| 2012 | AUUCUUUUGGGGCUGACUCUGUG | 1468 | | APP:2032L21 antisense siNA | cAGAGucAGccccAAAAGATT B | 1580 |
| | | | | (2014C) stab19 | | |
| 2481 | UGAAGUUGGACAGCAAAACCAUU | 1469 | | APP:2501L21 antisense siNA | uGGuuuuGcuGuccAAcuuTT B | 1581 |
| | | | | (2483C) stab19 | | |
| 2482 | GAAGUUGGACAGCAAAACCAUUG | 1470 | | APP:2502L21 antisense siNA | AuGGuuuuGcuGuccAAcuTT B | 1582 |
| | | | | (2484C) stab19 | | |
| 791 | CAGACUAUGCAGAUGGGAGUGAA | 1463 | | APP:811L21 antisense siNA | CACUCCCAUCUGCAUAGUCTT B | 1583 |
| | | | | (793C) stab22 | | |
| 829 | GUAGCAGAGGAGGAAGAAGUGGC | 1464 | | APP:849L21 antisense siNA | CACUUCUUCCUCCUCUGCUTT B | 1584 |
| | | | | (831C) stab22 | | |
| 851 | CUGAGGUGGAAGAAGAAGAAGCC | 1465 | | APP:871L21 antisense siNA | CUUCUUCUUCUUCCACCUCTT B | 1585 |
| | | | | (853C) stab22 | | |
| 1356 | AGAGAGAAUGUCCCAGGUCAUGA | 1466 | | APP:1376L21 antisense siNA | AUGACCUGGGACAUUCUCUTT B | 1586 |
| | | | | (1358C) stab22 | | |
| 1568 | AGAACUACAUCACCGCUCUGCAG | 1467 | | APP:1588L21 antisense siNA | GCAGAGCGGUGAUGUAGUUTT B | 1587 |
| | | | | (1570C) stab22 | | |
| 2012 | AUUCUUUUGGGGCUGACUCUGUG | 1468 | | APP:2032L21 antisense siNA | CAGAGUCAGCCCCAAAAGATT B | 1588 |
| | | | | (2014C) stab22 | | |
| 2481 | UGAAGUUGGACAGCAAAACCAUU | 1469 | | APP:2501L21 antisense siNA | UGGUUUUGCUGUCCAACUUTT B | 1589 |
| | | | | (2483C) stab22 | | |
| 2482 | GAAGUUGGACAGCAAAACCAUUG | 1470 | | APP:2502L21 antisense siNA | AUGGUUUUGCUGUCCAACUTT B | 1590 |
| | | | | (2484C) stab22 | | |

BACE

| | | | |
|---|---|---|---|
| Target | Seq | Cmpd | Seq |

| | | | | | | |
|---|---|---|---|---|---|---|
| Pos | Target | ID | # | Aliases | Sequence | ID |

| | | | | | | |
|---|---|---|---|---|---|---|
| 1025 | CCUGGAGCCUUUCUUUGACUCUC | 1471 | | BACE:1027U21 sense siNA | UGGAGCCUUUCUUUGACUCTT | 1591 |
| 1028 | GGAGCCUUUCUUUGACUCUCUGG | 1472 | | BACE:1030U21 sense siNA | AGCCUUUCUUUGACUCUCUTT | 1592 |
| 1393 | AGAAGUUCCCUGAUGGUUUCUGG | 1473 | | BACE:1395U21 sense siNA | AAGUUCCCUGAUGGUUUCUTT | 1593 |
| 1490 | AAUGGGUGAGGUUACCAACCAGU | 1474 | 31005 | BACE:1492U21 sense siNA | UGGGUGAGGUUACCAACCATT | 1594 |
| 1753 | UCACCUUGGACAUGGAAGACUGU | 1475 | 31006 | BACE:1755U21 sense siNA | ACCUUGGACAUGGAAGACUTT | 1595 |
| 1803 | UCAACCCUCAUGACCAUAGCCUA | 1476 | | BACE:1805U21 sense siNA | AACCCUCAUGACCAUAGCCTT | 1596 |
| 2457 | CCUAACAUUGGUGCAAAGAUUGC | 1477 | 31007 | BACE:2459U21 sense siNA | UAACAUUGGUGCAAAGAUUTT | 1597 |
| 3583 | UAUGGGACCUGCUAAGUGUGGAA | 1478 | 31008 | BACE:3585U21 sense siNA | UGGGACCUGCUAAGUGUGGTT | 1598 |
| 1025 | CCUGGAGCCUUUCUUUGACUCUC | 1471 | | BACE:1045L21 antisense siNA | GAGUCAAAGAAAGGCUCCATT | 1599 |
| | | | | (1027C) | | |
| 1028 | GGAGCCUUUCUUUGACUCUCUGG | 1472 | | BACE:1048L21 antisense siNA | AGAGAGUCAAAGAAAGGCUTT | 1600 |
| | | | | (1030C) | | |
| 1393 | AGAAGUUCCCUGAUGGUUUCUGG | 1473 | | BACE:1413L21 antisense siNA | AGAAACCAUCAGGGAACUUTT | 1601 |
| | | | | (1395C) | | |
| 1490 | AAUGGGUGAGGUUACCAACCAGU | 1474 | 31081 | BACE:1510L21 antisense siNA | UGGUUGGUAACCUCACCCATT | 1602 |
| | | | | (1492C) | | |
| 1753 | UCACCUUGGACAUGGAAGACUGU | 1475 | 31082 | BACE:1773L21 antisense siNA | AGUCUUCCAUGUCCAAGGUTT | 1603 |
| | | | | (1755C) | | |
| 1803 | UCAACCCUCAUGACCAUAGCCUA | 1476 | | BACE:1823L21 antisense siNA | GGCUAUGGUCAUGAGGGUUTT | 1604 |
| | | | | (1805C) | | |
| 2457 | CCUAACAUUGGUGCAAAGAUUGC | 1477 | 31083 | BACE:2477L21 antisense siNA | AAUCUUUGCACCAAUGUUATT | 1605 |
| | | | | (2459C) | | |
| 3583 | UAUGGGACCUGCUAAGUGUGGAA | 1478 | 31084 | BACE:3603L21 antisense siNA | CCACACUUAGCAGGUCCCATT | 1606 |
| | | | | (3585C) | | |
| 1025 | CCUGGAGCCUUUCUUUGACUCUC | 1471 | | BACE:1027U21 sense siNA | B uGGAGccuuucuuuGAcucTT B | 1607 |
| | | | | stab04 | | |
| 1028 | GGAGCCUUUCUUUGACUCUCUGG | 1472 | | BACE:1030U21 sense siNA | B AGccuuucuuuGAcucucuTT B | 1608 |
| | | | | stab04 | | |
| 1393 | AGAAGUUCCCUGAUGGUUUCUGG | 1473 | | BACE:1395U21 sense siNA | B AAGuucccuGAuGGuuucuTT B | 1609 |
| | | | | stab04 | | |
| 1490 | AAUGGGUGAGGUUACCAACCAGU | 1474 | 30729 | BACE:1492U21 sense siNA | B uGGGuGAGGuuAccAAccATT B | 1610 |
| | | | | stab04 | | |
| 1753 | UCACCUUGGACAUGGAAGACUGU | 1475 | 30730 | BACE:1755U21 sense siNA | B AccuuGGAcAuGGAAGAcuTT B | 1611 |
| | | | | stab04 | | |
| 1803 | UCAACCCUCAUGACCAUAGCCUA | 1476 | | BACE:1805U21 sense siNA | B AAcccucAuGAccAuAGccTT B | 1612 |
| | | | | stab04 | | |
| 2457 | CCUAACAUUGGUGCAAAGAUUGC | 1477 | 31378 | BACE:2459U21 sense siNA | B uAAcAuuGGuGcAAAGAuuTT B | 1613 |
| | | | | stab04 | | |
| 3583 | UAUGGGACCUGCUAAGUGUGGAA | 1478 | 30732 | BACE:3585U21 sense siNA | B uGGGAccuGcuAAGuGuGGTT B | 1614 |
| | | | | stab04 | | |
| 1025 | CCUGGAGCCUUUCUUUGACUCUC | 1471 | | BACE:1045L21 antisense siNA | GAGucAAAGAAAGGcuccATsT | 1615 |
| | | | | (1027C) stab05 | | |
| 1028 | GGAGCCUUUCUUUGACUCUCUGG | 1472 | | BACE:1048L21 antisense siNA | AGAGAGucAAAGAAAGGcuTsT | 1616 |
| | | | | (1030C) stab05 | | |
| 1393 | AGAAGUUCCCUGAUGGUUUCUGG | 1473 | | BACE:1413L21 antisense siNA | AGAAAccAucAGGGAAcuuTsT | 1617 |
| | | | | (1395C) stab05 | | |
| 1490 | AAUGGGUGAGGUUACCAACCAGU | 1474 | 30733 | BACE:1510L21 antisense siNA | uGGuuGGuAAccucAcccATsT | 1618 |
| | | | | (1492C) stab05 | | |
| 1753 | UCACCUUGGACAUGGAAGACUGU | 1475 | 30734 | BACE:1773L21 antisense siNA | AGucuuccAuGuccAAGGuTsT | 1619 |
| | | | | (1755C) stab05 | | |
| 1803 | UCAACCCUCAUGACCAUAGCCUA | 1476 | | BACE:1823L21 antisense siNA | GGcuAuGGucAuGAGGGuuTsT | 1620 |
| | | | | (1805C) stab05 | | |
| 2457 | CCUAACAUUGGUGCAAAGAUUGC | 1477 | 31381 | BACE:2477L21 antisense siNA | AAucuuuGcAccAAuGuuATsT | 1621 |
| | | | | (2459C) stab05 | | |
| 3583 | UAUGGGACCUGCUAAGUGUGGAA | 1478 | 30736 | BACE:3603L21 antisense siNA | ccAcAcuuAGcAGGucccATsT | 1622 |
| | | | | (3585C) stab05 | | |
| 1025 | CCUGGAGCCUUUCUUUGACUCUC | 1471 | | BACE:1027U21 sense siNA | B uGGAGccuuucuuuGAcucTT B | 1623 |
| | | | | stab07 | | |
| 1028 | GGAGCCUUUCUUUGACUCUCUGG | 1472 | | BACE:1030U21 sense siNA | B AGccuuucuuuGAcucucuTT B | 1624 |
| | | | | stab07 | | |
| 1393 | AGAAGUUCCCUGAUGGUUUCUGG | 1473 | | BACE:1395U21 sense siNA | B AAGuucccuGAuGGuuucuTT B | 1625 |
| | | | | stab07 | | |
| 1490 | AAUGGGUGAGGUUACCAACCAGU | 1474 | | BACE:1492U21 sense siNA | B uGGGuGAGGuuAccAAccATT B | 1626 |
| | | | | stab07 | | |
| 1753 | UCACCUUGGACAUGGAAGACUGU | 1475 | | BACE:1755U21 sense siNA | B AccuuGGAcAuGGAAGAcuTT B | 1627 |
| | | | | stab07 | | |
| 1803 | UCAACCCUCAUGACCAUAGCCUA | 1476 | | BACE:1805U21 sense siNA | B AAcccucAuGAccAuAGccTT B | 1628 |
| | | | | stab07 | | |
| 2457 | CCUAACAUUGGUGCAAAGAUUGC | 1477 | 31384 | BACE:2459U21 sense siNA | B uAAcAuuGGuGcAAAGAuuTT B | 1629 |
| | | | | stab07 | | |
| 3583 | UAUGGGACCUGCUAAGUGUGGAA | 1478 | | BACE:3585U21 sense siNA | B uGGGAccuGcuAAGuGuGGTT B | 1630 |
| | | | | stab07 | | |
| 1025 | CCUGGAGCCUUUCUUUGACUCUC | 1471 | | BACE:1045L21 antisense siNA | GAGucAAAGAAAGGcuccATsT | 1631 |
| | | | | (1027C) stab11 | | |
| 1028 | GGAGCCUUUCUUUGACUCUCUGG | 1472 | | BACE:1048L21 antisense siNA | AGAGAGucAAAGAAAGGcuTsT | 1632 |
| | | | | (103CC) stab11 | | |
| 1393 | AGAAGUUCCCUGAUGGUUUCUGG | 1473 | | BACE:1413L21 antisense siNA | AGAAAccAucAGGGAAcuuTsT | 1633 |
| | | | | (1395C) stab11 | | |
| 1490 | AAUGGGUGAGGUUACCAACCAGU | 1474 | | BACE:1510L21 antisense siNA | GGuuGGuAAccucAcccATsT | 1634 |
| | | | | (1492C) stab11 | | |
| 1753 | UCACCUUGGACAUGGAAGACUGU | 1475 | | BACE:1773L21 antisense siNA | GucuuccAuGuccAAGGuTsT | 1635 |
| | | | (1755C) stab11 | | | |
| 1803 | UCAACCCUCAUGACCAUAGCCUA | 1476 | | BACE:1823L21 antisense siNA | GcuAuGGucAuGAGGGuuTsT | 1636 |
| | | | | (1805C) stab11 | | |
| 2457 | CCUAACAUUGGUGCAAAGAUUGC | 1477 | 31387 | BACE:2477L21 antisense siNA | AucuuuGcAccAAuGuuATsT | 1637 |
| | | | | (2459C) stab11 | | |
| 3583 | UAUGGGACCUGCUAAGUGUGGAA | 1478 | | BACE:3603L21 antisense siNA | ccAcAcuuAGcAGGucccATsT | 1638 |
| | | | | (3585C) stab11 | | |
| 1025 | CCUGGAGCCUUUCUUUGACUCUC | 1471 | | BACE:1027U21 sense siNA | B uGGAGccuuucuuuGAcucTT B | 1639 |
| | | | | stab18 | | |
| 1028 | GGAGCCUUUCUUUGACUCUCUGG | 1472 | | BACE:1030U21 sense siNA | B AGccuuucuuuGAcucucuTT B | 1640 |
| | | | | stab18 | | |
| 1393 | AGAAGUUCCCUGAUGGUUUCUGG | 1473 | | BACE:1395U21 sense siNA | B AAGuucccuGAuGGuuucuTT B | 1641 |
| | | | | stab18 | | |
| 1490 | AAUGGGUGAGGUUACCAACCAGU | 1474 | | BACE:1492U21 sense siNA | B uGGGuGAGGuuAccAACcATT B | 1642 |
| | | | | stab18 | | |
| 1753 | UCACCUUGGACAUGGAAGACUGU | 1475 | | BACE:1755U21 sense siNA | B AccuuGGAcAuGGAAGACuTT B | 1643 |
| | | | | stab18 | | |
| 1803 | UCAACCCUCAUGACCAUAGCCUA | 1476 | | BACE:1805U21 sense siNA | B AAcccucAuGAccAuAGccTT B | 1644 |
| | | | | stab18 | | |
| 2457 | CCUAACAUUGGUGCAAAGAUUGC | 1477 | | BACE:2459U21 sense siNA | B uAAcAuuGGuGcAAAGAuuTT B | 1645 |
| | | | | stab18 | | |
| 3583 | UAUGGGACCUGCUAAGUGUGGAA | 1478 | | BACE:3585U21 sense siNA | B uGGGAccuGcuAAGuGuGGTT B | 1646 |
| | | | | stab18 | | |
| 1025 | CCUGGAGCCUUUCUUUGACUCUC | 1471 | | BACE:1045L21 antisense siNA | GAGucAAAGAAAGGcuccATsT | 1647 |
| | | | | (1027C) stab08 | | |
| 1028 | GGAGCCUUUCUUUGACUCUCUGG | 1472 | | BACE:1048L21 antisense siNA | AGAGAGucAAAGAAAGGcuTsT | 1648 |
| | | | | (1030C) stab08 | | |
| 1393 | AGAAGUUCCCUGAUGGUUUCUGG | 1473 | | BACE:1413L21 antisense siNA | AGAAAccAucAGGGAAcuuTsT | 1649 |
| | | | | (1395C) stab08 | | |
| 1490 | AAUGGGUGAGGUUACCAACCAGU | 1474 | | BACE:1510L21 antisense siNA | uGGuuGGuAAccucAcccATsT | 1650 |
| | | | | (1492C) stab08 | | |
| 1753 | UCACCUUGGACAUGGAAGACUGU | 1475 | | BACE:1773L21 antisense siNA | AGucuuccAuGuccAAGGuTsT | 1651 |
| | | | | (1755C) stab08 | | |
| 1803 | UCAACCCUCAUGACCAUAGCCUA | 1476 | | BACE:1823L21 antisense siNA | GGcuAuGGucAuGAGGGuuTsT | 1652 |
| | | | | (1805C) stab08 | | |
| 2457 | CCUAACAUUGGUGCAAAGAUUGC | 1477 | | BACE:2477L21 antisense siNA | AAucuuuGcAccAAuGuuATsT | 1653 |
| | | | | (2459C) stab08 | | |
| 3583 | UAUGGGACCUGCUAAGUGUGGAA | 1478 | | BACE:3603L21 antisense siNA | ccAcAcuuAGcAGGucccATsT | 1654 |
| | | | | (3585C) stab08 | | |
| 1025 | CCUGGAGCCUUUCUUUGACUCUC | 1471 | | BACE:1027U21 sense siNA | B UGGAGCCUUUCUUUGACUCTT B | 1655 |
| | | | | stab09 | | |
| 1028 | GGAGCCUUUCUUUGACUCUCUGG | 1472 | | BACE:1030U21 sense siNA | B AGCCUUUCUUUGACUCUCUTT B | 1656 |
| | | | | stab09 | | |
| 1393 | AGAAGUUCCCUGAUGGUUUCUGG | 1473 | | BACE:1395U21 sense siNA | B AAGUUCCCUGAUGGUUUCUTT B | 1657 |
| | | | | stab09 | | |
| 1490 | AAUGGGUGAGGUUACCAACCAGU | 1474 | | BACE:1492U21 sense siNA | B UGGGUGAGGUUACCAACCATT B | 1658 |
| | | | | stab09 | | |
| 1753 | UCACCUUGGACAUGGAAGACUGU | 1475 | | BACE:1755U21 sense siNA | B ACCUUGGACAUGGAAGACUTT B | 1659 |
| | | | | stab09 | | |
| 1803 | UCAACCCUCAUGACCAUAGCCUA | 1476 | | BACE:1805U21 sense siNA | B AACCCUCAUGACCAUAGCCTT B | 1660 |
| | | | | stab09 | | |
| 2457 | CCUAACAUUGGUGCAAAGAUUGC | 1477 | | BACE:2459U21 sense siNA | B UAACAUUGGUGCAAAGAUUTT B | 1661 |
| | | | | stab09 | | |
| 3583 | UAUGGGACCUGCUAAGUGUGGAA | 1478 | | BACE:3585U21 sense siNA | B UGGGACCUGCUAAGUGUGGTT B | 1662 |
| | | | | stab09 | | |
| 1025 | CCUGGAGCCUUUCUUUGACUCUC | 1471 | | BACE:1045L21 antisense siNA | GAGUCAAAGAAAGGCUCCATsT | 1663 |
| | | | | (1027C) stab10 | | |
| 1028 | GGAGCCUUUCUUUGACUCUCUGG | 1472 | | BACE:1048L21 antisense siNA | AGAGAGUCAAAGAAAGGCUTsT | 1664 |
| | | | | (1030C) stab10 | | |
| 1393 | AGAAGUUCCCUGAUGGUUUCUGG | 1473 | | BACE:1413L21 antisense siNA | AGAAACCAUCAGGGAACUUTsT | 1665 |
| | | | | (1395C) stab10 | | |
| 1490 | AAUGGGUGAGGUUACCAACCAGU | 1474 | | BACE:1510L21 antisense siNA | UGGUUGGUAACCUCACCCATsT | 1666 |
| | | | | (1492C) stab10 | | |
| 1753 | UCACCUUGGACAUGGAAGACUGU | 1475 | | BACE:1773L21 antisense siNA | AGUCUUCCAUGUCCAAGGUTsT | 1667 |
| | | | | (1755C) stab10 | | |
| 1803 | UCAACCCUCAUGACCAUAGCCUA | 1476 | | BACE:1823L21 antisense siNA | GGCUAUGGUCAUGAGGGUUTsT | 1668 |
| | | | | (1805C) stab10 | | |
| 2457 | CCUAACAUUGGUGCAAAGAUUGC | 1477 | | BACE:2477L21 antisense siNA | AAUCUUUGCACCAAUGUUATsT | 1669 |
| | | | | (2459C) stab10 | | |
| 3583 | UAUGGGACCUGCUAAGUGUGGAA | 1478 | | BACE:3603L21 antisense siNA | CCACACUUAGCAGGUCCCATsT | 1670 |
| | | | | (3585C) stab10 | | |
| 1025 | CCUGGAGCCUUUCUUUGACUCUC | 1471 | | BACE:1045L21 antisense siNA | GAGucAAAGAAAGGcuccATT B | 1671 |
| | | | | (1027C) stab19 | | |
| 1028 | GGAGCCUUUCUUUGACUCUCUGG | 1472 | | BACE:1048L21 antisense siNA | AGAGAGucAAAGAAAGGcuTT B | 1672 |
| | | | | (1030C) stab19 | | |
| 1393 | AGAAGUUCCCUGAUGGUUUCUGG | 1473 | | BACE:1413L21 antisense siNA | AGAAAccAucAGGGAAcuuTT B | 1673 |
| | | | | (1395C) stab19 | | |
| 1490 | AAUGGGUGAGGUUACCAACCAGU | 1474 | | BACE:1510L21 antisense siNA | uGGuuGGuAAccucAcccATT B | 1674 |
| | | | | (1492C) stab19 | | |
| 1753 | UCACCUUGGACAUGGAAGACUGU | 1475 | | BACE:1773L21 antisense siNA | AGucuuccAuGuccAAGGuTT B | 1675 |
| | | | | (1755C) stab19 | | |
| 1803 | UCAACCCUCAUGACCAUAGCCUA | 1476 | | BACE:1823L21 antisense siNA | GGcuAuGGucAuGAGGGuuTT B | 1676 |
| | | | | (1805C) stab19 | | |
| 2457 | CCUAACAUUGGUGCAAAGAUUGC | 1477 | | BACE:2477L21 antisense siNA | AAucuuuGcAccAAuGuuATT B | 1677 |
| | | | | (2459C) stab19 | | |
| 3583 | UAUGGGACCUGCUAAGUGUGGAA | 1478 | | BACE:3603L21 antisense siNA | ccAcAcuuAGcAGGucccATT B | 1678 |
| | | | | (3585C) stab19 | | |
| 1025 | CCUGGAGCCUUUCUUUGACUCUC | 1471 | | BACE:1045L21 antisense siNA | GAGUCAAAGAAAGGCUCCATT B | 1679 |
| | | | | (1027C) stab22 | | |
| 1028 | GGAGCCUUUCUUUGACUCUCUGG | 1472 | | BACE:1048L21 antisense siNA | AGAGAGUCAAAGAAAGGCUTT B | 1680 |
| | | | | (1030C) stab22 | | |
| 1393 | AGAAGUUCCCUGAUGGUUUCUGG | 1473 | | BACE:1413L21 antisense siNA | AGAAACCAUCAGGGAACUUTT B | 1681 |
| | | | | (1395C) stab22 | | |
| 1490 | AAUGGGUGAGGUUACCAACCAGU | 1474 | | BACE:1510L21 antisense siNA | UGGUUGGUAACCUCACCCATT B | 1682 |
| | | | | (1492C) stab22 | | |
| 1753 | UCACCUUGGACAUGGAAGACUGU | 1475 | | BACE:1773L21 antisense siNA | AGUCUUCCAUGUCCAAGGUTT B | 1683 |
| | | | | (1755C) stab22 | | |
| 1803 | UCAACCCUCAUGACCAUAGCCUA | 1476 | | BACE:1823L21 antisense siNA | GGCUAUGGUCAUGAGGGUUTT B | 1684 |
| | | | | (1805C) stab22 | | |
| 2457 | CCUAACAUUGGUGCAAAGAUUGC | 1477 | | BACE:2477L21 antisense siNA | AAUCUUUGCACCAAUGUUATT B | 1685 |
| | | | | (2459C) stab22 | | |
| 3583 | UAUGGGACCUGCUAAGUGUGGAA | 1478 | | BACE:3603L21 antisense siNA | CCACACUUAGCAGGUCCCATT B | 1686 |
| | | | | (3585C) stab22 | | |
| 2457 | CCUAACAUUGGUGCAAAGAUUGC | 657 | 31390 | BACE:2459U21 sense siNA inv | B uuAGAAAcGuGGuuAcAAuTT B | 1687 |
| | | | | stab04 | | |
| 2457 | CCUAACAUUGGUGCAAAGAUUGC | 657 | 31393 | BACE:2477L21 antisense siNA | AuuGuAAccAcGuuucuAATsT | 1688 |
| | | | | (2459C) inv stab05 | | |
| 2457 | CCUAACAUUGGUGCAAAGAUUGC | 657 | 31396 | BACE:2459U21 sense siNA inv | B uuAGAAAcGuGGuuAcAAuTT B | 1689 |
| | | | | stab07 | | |
| 2457 | CCUAACAUUGGUGCAAAGAUUGC | 657 | 31399 | BACE:2477L21 antisense siNA | AuuGuAAccAcGuuucuAATsT | 1690 |
| | | | | (2459C) inv stab11 | | |

PSEN1

| | | | |
|---|---|---|---|
| Target | Seq | Cmpd | Seq |

| | | | | | | |
|---|---|---|---|---|---|---|
| Pos | Target | ID | # | Aliases | Sequence | ID |

| | | | | | | |
|---|---|---|---|---|---|---|
| 693 | CUAAUGGACGACCCCAGGGUAAC | 1479 | | PSEN1:695U21 sense siNA | AAUGGACGACCCCAGGGUATT | 1691 |
| 1131 | CUGUUGCACUCCUGAUCUGGAAU | 1480 | | PSEN1:1133U21 sense siNA | GUUGCACUCCUGAUCUGGATT | 1692 |
| 1493 | GAAAGCACAGAAAGGGAGUCACA | 1481 | | PSEN1:1495U21 sense siNA | AAGCACAGAAAGGGAGUCATT | 1693 |
| 1505 | AGGGAGUCACAAGACACUGUUGC | 1482 | | PSEN1:1507U21 sense siNA | GGAGUCACAAGACACUGUUTT | 1694 |
| 1748 | GACUGGAACACAACCAUAGCCUG | 1483 | | PSEN1:1750U21 sense siNA | CUGGAACACAACCAUAGCCTT | 1695 |
| 1751 | UGGAACACAACCAUAGCCUGUUU | 1484 | | PSEN1:1753U21 sense siNA | GAACACAACCAUAGCCUGUTT | 1696 |
| 2184 | CUACCAGAUUUGAGGGACGAGGU | 1485 | | PSEN1:2186U21 sense siNA | ACCAGAUUUGAGGGACGAGTT | 1697 |
| 3007 | UGUAUGCCCAAAGCGGUAGAAUU | 1486 | | PSEN1:3009U21 sense siNA | UAUGCCCAAAGCGGUAGAATT | 1698 |
| 693 | CUAAUGGACGACCCCAGGGUAAC | 1479 | | PSEN1:713L21 antisense siNA | UACCCUGGGGUCGUCCAUUTT | 1699 |
| | | | | (695C) | | |
| 1131 | CUGUUGCACUCCUGAUCUGGAAU | 1480 | | PSEN1:1151L21 antisense siNA | UCCAGAUCAGGAGUGCAACTT | 1700 |
| | | | | (1133C) | | |
| 1493 | GAAAGCACAGAAAGGGAGUCACA | 1481 | | PSEN1:1513L21 antisense siNA | UGACUCCCUUUCUGUGCUUTT | 1701 |
| | | | | (1495C) | | |
| 1505 | AGGGAGUCACAAGACACUGUUGC | 1482 | | PSEN1:1525L21 antisense siNA | AACAGUGUCUUGUGACUCCTT | 1702 |
| | | | | (1507C) | | |
| 1748 | GACUGGAACACAACCAUAGCCUG | 1483 | | PSEN1:1768L21 antisense siNA | GGCUAUGGUUGUGUUCCAGTT | 1703 |
| | | | | (1750C) | | |
| 1751 | UGGAACACAACCAUAGCCUGUUU | 1484 | | PSEN1:1771L21 antisense siNA | ACAGGCUAUGGUUGUGUUCTT | 1704 |
| | | | | (1753C) | | |
| 2184 | CUACCAGAUUUGAGGGACGAGGU | 1485 | | PSEN1:2204L21 antisense siNA | CUCGUCCCUCAAAUCUGGUTT | 1705 |
| | | | | (2186C) | | |
| 3007 | UGUAUGCCCAAAGCGGUAGAAUU | 1486 | | PSEN1:3027L21 antisense siNA | UUCUACCGCUUUGGGCAUATT | 1706 |
| | | | | (3009C) | | |
| 693 | CUAAUGGACGACCCCAGGGUAAC | 1479 | | PSEN1:695U21 sense siNA | B AAuGGAcGAccccAGGGuATT B | 1707 |
| | | | | stab04 | | |
| 1131 | CUGUUGCACUCCUGAUCUGGAAU | 1480 | | PSEN1:1133U21 sense siNA | B GuuGcAcuccuGAucuGGATT B | 1708 |
| | | | | stab04 | | |
| 1493 | GAAAGCACAGAAAGGGAGUCACA | 1481 | | PSEN1:1495U21 sense siNA | B AAGcAcAGAAAGGGAGucATT B | 1709 |
| | | | | stab04 | | |
| 1505 | AGGGAGUCACAAGACACUGUUGC | 1482 | | PSEN1:1507U21 sense siNA | B GGAGucAcAAGAcAcuGuuTT B | 1710 |
| | | | | stab04 | | |
| 1748 | GACUGGAACACAACCAUAGCCUG | 1483 | | PSEN1:1750U21 sense siNA | B cuGGAAcAcAAccAuAGccTT B | 1711 |
| | | | | stab04 | | |
| 1751 | UGGAACACAACCAUAGCCUGUUU | 1484 | | PSEN1:1753U21 sense siNA | B GAAcAcAAccAuAGccuGuTT B | 1712 |
| | | | | stab04 | | |
| 2184 | CUACCAGAUUUGAGGGACGAGGU | 1485 | | PSEN1:2186U21 sense siNA | B AccAGAuuuGAGGGAcGAGTT B | 1713 |
| | | | | stab04 | | |
| 3007 | UGUAUGCCCAAAGCGGUAGAAUU | 1486 | | PSEN1:3009U21 sense siNA | B uAuGcccAAAGcGGuAGAATT B | 1714 |
| | | | | stab04 | | |
| 693 | CUAAUGGACGACCCCAGGGUAAC | 1479 | | PSEN1:713L21 antisense siNA | uAcccuGGGGucGuccAuuTsT | 1715 |
| | | | | (695C) stab05 | | |
| 1131 | CUGUUGCACUCCUGAUCUGGAAU | 1480 | | PSEN1:1151L21 antisense siNA | uccAGAucAGGAGuGcAAcTsT | 1716 |
| | | | | (1133C) stab05 | | |
| 1493 | GAAAGCACAGAAAGGGAGUCACA | 1481 | | PSEN1:1513L21 antisense siNA | uGAcucccuuucuGuGcuuTsT | 1717 |
| | | | | (1495C) stab05 | | |
| 1505 | AGGGAGUCACAAGACACUGUUGC | 1482 | | PSEN1:1525L21 antisense siNA | AAcAGuGucuuGuGAcuccTsT | 1718 |
| | | | | (1507C) stab05 | | |
| 1748 | GACUGGAACACAACCAUAGCCUG | 1483 | | PSEN1:1768L21 antisense siNA | GGcuAuGGuuGuGuuccAGTsT | 1719 |
| | | | | (1750C) stab05 | | |
| 1751 | UGGAACACAACCAUAGCCUGUUU | 1484 | | PSEN1:1771L21 antisense siNA | AcAGGcuAuGGuuGuGuucTsT | 1720 |
| | | | | (1753C) stab05 | | |
| 2184 | CUACCAGAUUUGAGGGACGAGGU | 1485 | | PSEN1:2204L21 antisense siNA | cucGucccucAAAucuGGuTsT | 1721 |
| | | | | (2186C) stab05 | | |
| 3007 | UGUAUGCCCAAAGCGGUAGAAUU | 1486 | | PSEN1:3027L21 antisense siNA | uucuAccGcuuuGGGcAuATsT | 1722 |
| | | | | (3009C) stab05 | | |
| 693 | CUAAUGGACGACCCCAGGGUAAC | 1479 | | PSEN1:695U21 sense siNA | B AAuGGAcGAccccAGGGuATT B | 1723 |
| | | | | stab07 | | |
| 1131 | CUGUUGCACUCCUGAUCUGGAAU | 1480 | | PSEN1:1133U21 sense siNA | B GuuGcAcuccuGAucuGGATT B | 1724 |
| | | | | stab07 | | |
| 1493 | GAAAGCACAGAAAGGGAGUCACA | 1481 | | PSEN1:1495U21 sense siNA | B AAGcAcAGAAAGGGAGucATT B | 1725 |
| | | | | stab07 | | |
| 1505 | AGGGAGUCACAAGACACUGUUGC | 1482 | | PSEN1:1507U21 sense siNA | B GGAGucAcAAGAcAcuGuuTT B | 1726 |
| | | | | stab07 | | |
| 1748 | GACUGGAACACAACCAUAGCCUG | 1483 | | PSEN1:1750U21 sense siNA | B cuGGAAcAcAAccAuAGccTT B | 1727 |
| | | | | stab07 | | |
| 1751 | UGGAACACAACCAUAGCCUGUUU | 1484 | | PSEN1:1753U21 sense siNA | B GAAcAcAAccAuAGccuGuTT B | 1728 |
| | | | | stab07 | | |
| 2184 | CUACCAGAUUUGAGGGACGAGGU | 1485 | | PSEN1:2186U21 sense siNA | B AccAGAuuuGAGGGAcGAGTT B | 1729 |
| | | | | stab07 | | |
| 3007 | UGUAUGCCCAAAGCGGUAGAAUU | 1486 | | PSEN1:3009U21 sense siNA | B uAuGcccAAAGcGGuAGAATT B | 1730 |
| | | | | stab07 | | |
| 693 | CUAAUGGACGACCCCAGGGUAAC | 1479 | | PSEN1:713L21 antisense siNA | uAcccuGGGGucGuccAuuTsT | 1731 |
| | | | | (695C) stab11 | | |
| 1131 | CUGUUGCACUCCUGAUCUGGAAU | 1480 | | PSEN1:1151L21 antisense siNA | uccAGAucAGGAGuGcAAcTsT | 1732 |
| | | | | (1133C) stab11 | | |
| 1493 | GAAAGCACAGAAAGGGAGUCACA | 1481 | | PSEN1:1513L21 antisense siNA | uGAcucccuuucuGuGcuuTsT | 1733 |
| | | | | (1495C) stab11 | | |
| 1505 | AGGGAGUCACAAGACACUGUUGC | 1482 | | PSEN1:1525L21 antisense siNA | AAcAGuGucuuGuGAcuccTsT | 1734 |
| | | | | (1507C) stab11 | | |
| 1748 | GACUGGAACACAACCAUAGCCUG | 1483 | | PSEN1:1768L21 antisense siNA | GGcuAuGGuuGuGuuccAGTsT | 1735 |
| | | | | (1750C) stab11 | | |
| 1751 | UGGAACACAACCAUAGCCUGUUU | 1484 | | PSEN1:1771L21 antisense siNA | AcAGGcuAuGGuuGuGuucTsT | 1736 |
| | | | | (1753C) stab11 | | |
| 2184 | CUACCAGAUUUGAGGGACGAGGU | 1485 | | PSEN1:2204L21 antisense siNA | cucGucccucAAAucuGGuTsT | 1737 |
| | | | | (2186C) stab11 | | |
| 3007 | UGUAUGCCCAAAGCGGUAGAAUU | 1486 | | PSEN1:3027L21 antisense siNA | uucuAccGcuuuGGGcAuATsT | 1738 |
| | | | | (3009C) stab11 | | |
| 693 | CUAAUGGACGACCCCAGGGUAAC | 1479 | | PSEN1:695U21 sense siNA | B AAuGGAcGAccccAGGGuATT B | 1739 |
| | | | | stab18 | | |
| 1131 | CUGUUGCACUCCUGAUCUGGAAU | 1480 | | PSEN1:1133U21 sense siNA | B GuuGcAcuccuGAucuGGATT B | 1740 |
| | | | | stab18 | | |
| 1493 | GAAAGCACAGAAAGGGAGUCACA | 1481 | | PSEN1:1495U21 sense siNA | B AAGcAcAGAAAGGGAGucATT B | 1741 |
| | | | | stab18 | | |
| 1505 | AGGGAGUCACAAGACACUGUUGC | 1482 | | PSEN1:1507U21 sense siNA | B GGAGucAcAAGAcAcuGuuTT B | 1742 |
| | | | | stab18 | | |
| 1748 | GACUGGAACACAACCAUAGCCUG | 1483 | | PSEN1:1750U21 sense siNA | B cuGGAAcAcAAccAuAGccTT B | 1743 |
| | | | | stab18 | | |
| 1751 | UGGAACACAACCAUAGCCUGUUU | 1484 | | PSEN1:1753U21 sense siNA | B GAAcAcAAccAuAGccuGuTT B | 1744 |
| | | | | stab18 | | |
| 2184 | CUACCAGAUUUGAGGGACGAGGU | 1485 | | PSEN1:2186U21 sense siNA | B AccAGAuuuGAGGGAcGAGTT B | 1745 |
| | | | | stab18 | | |
| 3007 | UGUAUGCCCAAAGCGGUAGAAUU | 1486 | | PSEN1:3009U21 sense siNA | B uAuGcccAAAGcGGuAGAATT B | 1746 |
| | | | | stab18 | | |
| 693 | CUAAUGGACGACCCCAGGGUAAC | 1479 | 33933 | PSEN1:713L21 antisense siNA | uAcccuGGGGucGuccAuuTsT | 1747 |
| | | | | (695C) stab08 | | |
| 1131 | CUGUUGGACUCCUGAUCUGGAAU | 1480 | 33934 | PSEN1:1151L21 antisense siNA | uccAGAucAGGAGuGcAAcTsT | 1748 |
| | | | | (1133C) stab08 | | |
| 1493 | GAAAGCACAGAAAGGGAGUCACA | 1481 | 33935 | PSEN1:1513L21 antisense siNA | uGAcucccuuucuGuGcuuTsT | 1749 |
| | | | | (1495C) stab08 | | |
| 1505 | AGGGAGUCACAAGACACUGUUGC | 1482 | 33936 | PSEN1:1525L21 antisense siNA | AAcAGuGucuuGuGAcuccTsT | 1750 |
| | | | | (1507C) stab08 | | |
| 1748 | GACUGGAACACAACCAUAGCCUG | 1483 | 33937 | PSEN1:1768L21 antisense siNA | GGcuAuGGuuGuGuuccAGTsT | 1751 |
| | | | | (17500) stab08 | | |
| 1751 | UGGAACACAACCAUAGCCUGUUU | 1484 | 33938 | PSEN1:1771L21 antisense siNA | AcAGGcuAuGGuuGuGuucTsT | 1752 |
| | | | | (1753C) stab08 | | |
| 2184 | CUACCAGAUUUGAGGGACGAGGU | 1485 | 33939 | PSEN1:2204L21 antisense siNA | cucGucccucAAAucuGGuTsT | 1753 |
| | | | | (2186C) stab08 | | |
| 3007 | UGUAUGCCCAAAGCGGUAGAAUU | 1486 | 33940 | PSEN1:3027L21 antisense siNA | uucuAccGcuuuGGGcAuATsT | 1754 |
| | | | | (3009C) stab08 | | |
| 693 | CUAAUGGACGACCCCAGGGUAAC | 1479 | 33917 | PSEN1:695U21 sense siNA | B AAUGGACGACCCCAGGGUATT B | 1755 |
| | | | | stab09 | | |
| 1131 | CUGUUGCACUCCUGAUCUGGAAU | 1480 | 33918 | PSEN1:1133U21 sense siNA | B GUUGCACUCCUGAUCUGGATT B | 1756 |
| | | | | stab09 | | |
| 1493 | GAAAGCACAGAAAGGGAGUCACA | 1481 | 33919 | PSEN1:1495U21 sense siNA | B AAGCACAGAAAGGGAGUCATT B | 1757 |
| | | | | stab09 | | |
| 1505 | AGGGAGUCACAAGACACUGUUGC | 1482 | 33920 | PSEN1:1507U21 sense siNA | B GGAGUCACAAGACACUGUUTT B | 1758 |
| | | | | stab09 | | |
| 1748 | GACUGGAACACAACCAUAGCCUG | 1483 | 33921 | PSEN1:1750U21 sense siNA | B CUGGAACACAACCAUAGCCTT B | 1759 |
| | | | | stab09 | | |
| 1751 | UGGAACACAACCAUAGCCUGUUU | 1484 | 33922 | PSEN1:1753U21 sense siNA | B GAACACAACCAUAGCCUGUTT B | 1760 |
| | | | | stab09 | | |
| 2184 | CUACCAGAUUUGAGGGACGAGGU | 1485 | 33923 | PSEN1:2186U21 sense siNA | B ACCAGAUUUGAGGGACGAGTT B | 1761 |
| | | | | stab09 | | |
| 3007 | UGUAUGCCCAAAGCGGUAGAAUU | 1486 | 33924 | PSEN1:3009U21 sense siNA | B UAUGCCCAAAGCGGUAGAATT B | 1762 |
| | | | | stab09 | | |
| 693 | CUAAUGGACGACCCCAGGGUAAC | 1479 | 33925 | PSEN1:713L21 antisense siNA | UACCCUGGGGUCGUCCAUUTsT | 1763 |
| | | | | (695C) stab10 | | |
| 1131 | CUGUUGCACUCCUGAUCUGGAAU | 1480 | 33926 | PSEN1:1151L21 antisense siNA | UCCAGAUCAGGAGUGCAACTsT | 1764 |
| | | | | (1133C) stab10 | | |
| 1493 | GAAAGCACAGAAAGGGAGUCACA | 1481 | 33927 | PSEN1:1513L21 antisense siNA | UGACUCCCUUUCUGUGCUUTsT | 1765 |
| | | | | (1495C) stab10 | | |
| 1505 | AGGGAGUCACAAGACACUGUUGC | 1482 | 33928 | PSEN1:1525L21 antisense siNA | AACAGUGUCUUGUGACUCCTsT | 1766 |
| | | | | (1507C) stab10 | | |
| 1748 | GACUGGAACACAACCAUAGCCUG | 1483 | 33929 | PSEN1:1768L21 antisense siNA | GGCUAUGGUUGUGUUCCAGTsT | 1767 |
| | | | | (1750C) stab10 | | |
| 1751 | UGGAACACAACCAUAGCCUGUUU | 1484 | 33930 | PSEN1:1771L21 antisense siNA | ACAGGCUAUGGUUGUGUUCTsT | 1768 |
| | | | | (1753C) stab10 | | |
| 2184 | CUACCAGAUUUGAGGGACGAGGU | 1485 | 33931 | PSEN1:2204L21 antisense siNA | CUCGUCCCUCAAAUCUGGUTsT | 1769 |
| | | | | (2186C) stab10 | | |
| 3007 | UGUAUGCCCAAAGCGGUAGAAUU | 1486 | 33932 | PSEN1:3027L21 antisense siNA | UUCUACCGCUUUGGGCAUATsT | 1770 |
| | | | | (3009C) stab10 | | |
| 693 | CUAAUGGACGACCCCAGGGUAAC | 1479 | | PSEN1:713L21 antisense siNA | uAcccuGGGGucGuccAuuTT B | 1771 |
| | | | | (695C) stab19 | | |
| 1131 | CUGUUGCACUCCUGAUCUGGAAU | 1480 | | PSEN1:1151L21 antisense siNA | uccAGAucAGGAGuGcAAcTT B | 1772 |
| | | | | (1133C) stab19 | | |
| 1493 | GAAAGCACAGAAAGGGAGUCACA | 1481 | | PSEN1:1513L21 antisense siNA | uGAcucccuuucuGuGcuuTT B | 1773 |
| | | | | (1495C) stab19 | | |
| 1505 | AGGGAGUCACAAGACACUGUUGC | 1482 | | PSEN1:1525L21 antisense siNA | AAcAGuGucuuGuGAcuccTT B | 1774 |
| | | | | (1507C) stab19 | | |
| 1748 | GACUGGAACACAACCAUAGCCUG | 1483 | | PSEN1:1768L21 antisense siNA | GGcuAuGGuuGuGuuccAGTT B | 1775 |
| | | | | (1750C) stab19 | | |
| 1751 | UGGAACACAACCAUAGCCUGUUU | 1484 | | PSEN1:1771L21 antisense siNA | AcAGGcuAuGGuuGuGuucTT B | 1776 |
| | | | | (1753C) stab19 | | |
| 2184 | CUACCAGAUUUGAGGGACGAGGU | 1485 | | PSEN1:2204L21 antisense siNA | cucGucccucAAAucuGGuTT B | 1777 |
| | | | | (2186C) stab19 | | |
| 3007 | UGUAUGCCCAAAGCGGUAGAAUU | 1486 | | PSEN1:3027L21 antisense siNA | uucuAccGcuuuGGGcAuATT B | 1778 |
| | | | | (3009C) stab19 | | |
| 693 | CUAAUGGACGACCCCAGGGUAAC | 1479 | | PSEN1:713L21 antisense siNA | UACCCUGGGGUCGUCCAUUTT B | 1779 |
| | | | | (695C) stab22 | | |
| 1131 | CUGUUGCACUCCUGAUCUGGAAU | 1480 | | PSEN1:1151L21 antisense siNA | UCCAGAUCAGGAGUGCAACTT B | 1780 |
| | | | | (1133C) stab22 | | |
| 1493 | GAAAGCACAGAAAGGGAGUCACA | 1481 | | PSEN1:1513L21 antisense siNA | UGACUCCCUUUCUGUGCUUTT B | 1781 |
| | | | | (1495C) stab22 | | |
| 1505 | AGGGAGUCACAAGACACUGUUGC | 1482 | | PSEN1:1525L21 antisense siNA | AACAGUGUCUUGUGACUCCTT B | 1782 |
| | | | | (1507C) stab22 | | |
| 1748 | GACUGGAACACAACCAUAGCCUG | 1483 | | PSEN1:1768L21 antisense siNA | GGCUAUGGUUGUGUUCCAGTT B | 1783 |
| | | | | (1750C) stab22 | | |
| 1751 | UGGAACACAACCAUAGCCUGUUU | 1484 | | PSEN1:1771L21 antisense siNA | ACAGGCUAUGGUUGUGUUCTT B | 1784 |
| | | | | (1753C) stab22 | | |
| 2184 | CUACCAGAUUUGAGGGACGAGGU | 1485 | | PSEN1:2204L21 antisense siNA | CUCGUCCCUCAAAUCUGGUTT B | 1785 |
| | | | | (2186C) stab22 | | |
| 3007 | UGUAUGCCCAAAGCGGUAGAAUU | 1486 | | PSEN1:3027L21 antisense siNA | UUCUACCGCUUUGGGCAUATT B | 1786 |
| | | | | (3009C) stab22 | | |

PSEN2

| | | | |
|---|---|---|---|
| Target | Seq | Cmpd | Seq |

| | | | | | | |
|---|---|---|---|---|---|---|
| Pos | Target | ID | # | Aliases | Sequence | ID |

| | | | | | | |
|---|---|---|---|---|---|---|
| 104 | UUACUGAUGAAGAAACUGAGGCC | 1487 | | PSEN2:106U21 sense siNA | ACUGAUGAAGAAACUGAGGTT | 1787 |
| 260 | AGCCAGGGAGCAUCAUUCAUUUA | 1488 | | PSEN2:262U21 sense siNA | CCAGGGAGCAUCAUUCAUUTT | 1788 |
| 549 | ACCGCUAUGUCUGUAGUGGGGUU | 1489 | | PSEN2:551U21 sense siNA | CGCUAUGUCUGUAGUGGGGTT | 1789 |
| 597 | AAGAGCUGACCCUCAAAUACGGA | 1490 | | PSEN2:599U21 sense siNA | GAGCUGACCCUCAAAUACGTT | 1790 |
| 730 | CACGACAUUCACUGAGGACACAC | 1491 | | PSEN2:732U21 sense siNA | CGACAUUCACUGAGGACACTT | 1791 |
| 938 | GUGCUCAAGACCUACAAUGUGGC | 1492 | | PSEN2:940U21 sense siNA | GCUCAAGACCUACAAUGUGTT | 1792 |
| 947 | ACCUACAAUGUGGCCAUGGACUA | 1493 | | PSEN2:949U21 sense siNA | CUACAAUGUGGCCAUGGACTT | 1793 |
| 2095 | GAGUGUUCCCAAUGCUUUGUCCA | 1494 | | PSEN2:2097U21 sense siNA | GUGUUCCCAAUGCUUUGUCTT | 1794 |
| 104 | UUACUGAUGAAGAAACUGAGGCC | 1487 | | PSEN2:124L21 antisense siNA | CCUCAGUUUCUUCAUCAGUTT | 1795 |
| | | | | (106C) | | |
| 260 | AGCCAGGGAGCAUCAUUCAUUUA | 1488 | | PSEN2:280L21 antisense siNA | AAUGAAUGAUGCUCCCUGGTT | 1796 |
| | | | | (262C) | | |
| 549 | ACCGCUAUGUCUGUAGUGGGGUU | 1489 | | PSEN2:569L21 antisense siNA | CCCCACUACAGACAUAGCGTT | 1797 |
| | | | | (551C) | | |
| 597 | AAGAGCUGACCCUCAAAUACGGA | 1490 | | PSEN2:617L21 antisense siNA | CGUAUUUGAGGGUCAGCUCTT | 1798 |
| | | | | (599C) | | |
| 730 | CACGACAUUCACUGAGGACACAC | 1491 | | PSEN2:750L21 antisense siNA | GUGUCCUCAGUGAAUGUCGTT | 1799 |
| | | | | (732C) | | |
| 938 | GUGCUCAAGACCUACAAUGUGGC | 1492 | | PSEN2:958L21 antisense siNA | CACAUUGUAGGUCUUGAGCTT | 1800 |
| | | | | (940C) | | |
| 947 | ACCUACAAUGUGGCCAUGGACUA | 1493 | | PSEN2:967L21 antisense siNA | GUCCAUGGCCACAUUGUAGTT | 1801 |
| | | | | (949C) | | |
| 2095 | GAGUGUUCCCAAUGCUUUGUCCA | 1494 | | PSEN2:2115L21 antisense siNA | GACAAAGCAUUGGGAACACTT | 1802 |
| | | | | (2097C) | | |
| 104 | UUACUGAUGAAGAAACUGAGGCC | 1487 | | PSEN2:106U21 sense siNA | B AcuGAuGAAGAAAcuGAGGTT B | 1803 |
| | | | | stab04 | | |
| 260 | AGCCAGGGAGCAUCAUUCAUUUA | 1488 | | PSEN2:262U21 sense siNA | B ccAGGGAGcAucAuucAuuTT B | 1804 |
| | | | | stab04 | | |
| 549 | ACCGCUAUGUCUGUAGUGGGGUU | 1489 | | PSEN2:551U21 sense siNA | B cGcuAuGucuGuAGuGGGGTT B | 1805 |
| | | | | stab04 | | |
| 597 | AAGAGCUGACCCUCAAAUACGGA | 1490 | | PSEN2:599U21 sense siNA | B GAGcuGAcccucAAAuAcGTT B | 1806 |
| | | | | stab04 | | |
| 730 | CACGACAUUCACUGAGGACACAC | 1491 | | PSEN2:732U21 sense siNA | B cGAcAuucAcuGAGGAcAcTT B | 1807 |
| | | | | stab04 | | |
| 938 | GUGCUCAAGACCUACAAUGUGGC | 1492 | | PSEN2:940U21 sense siNA | B GcucAAGAccuAcAAuGuGTT B | 1808 |
| | | | | stab04 | | |
| 947 | ACCUACAAUGUGGCCAUGGACUA | 1493 | | PSEN2:949U21 sense siNA | B cuAcAAuGuGGccAuGGAcTT B | 1809 |
| | | | | stab04 | | |
| 2095 | GAGUGUUCCCAAUGCUUUGUCCA | 1494 | | PSEN2:2097U21 sense siNA | B GuGuucccAAuGcuuuGucTT B | 1810 |
| | | | | stab04 | | |
| 104 | UUACUGAUGAAGAAACUGAGGCC | 1487 | | PSEN2:124L21 antisense siNA | ccucAGuuucuucAucAGuTsT | 1811 |
| | | | | (106C) stab05 | | |
| 260 | AGCCAGGGAGCAUCAUUCAUUUA | 1488 | | PSEN2:280L21 antisense siNA | AAuGAAuGAuGcucccuGGTsT | 1812 |
| | | | | (262C) stab05 | | |
| 549 | ACCGCUAUGUCUGUAGUGGGGUU | 1489 | | PSEN2:569L21 antisense siNA | ccccAcuAcAGAcAuAGcGTsT | 1813 |
| | | | | (551C) stab05 | | |
| 597 | AAGAGCUGACCCUCAAAUACGGA | 1490 | | PSEN2:617L21 antisense siNA | cGuAuuuGAGGGucAGcucTsT | 1814 |
| | | | | (5990) stab05 | | |
| 730 | CACGACAUUCACUGAGGACACAC | 1491 | | PSEN2:750L21 antisense siNA | GuGuccucAGuGAAuGucGTsT | 1815 |
| | | | | (7320) stab05 | | |
| 938 | GUGCUCAAGACCUACAAUGUGGC | 1492 | | PSEN2:958L21 antisense siNA | cAcAuuGuAGGucuuGAGcTsT | 1816 |
| | | | | (940C) stab05 | | |
| 947 | ACCUACAAUGUGGCCAUGGACUA | 1493 | | PSEN2:967L21 antisense siNA | GuccAuGGccAcAuuGuAGTsT | 1817 |
| | | | | (949C) stab05 | | |
| 2095 | GAGUGUUCCCAAUGCUUUGUCCA | 1494 | | PSEN2:2115L21 antisense siNA | GAcAAAGcAuuGGGAAcAcTsT | 1818 |
| | | | | (20970) stab05 | | |
| 104 | UUACUGAUGAAGAAACUGAGGCC | 1487 | | PSEN2:106U21 sense siNA | B AcuGAuGAAGAAAcuGAGGTT B | 1819 |
| | | | | stab07 | | |
| 260 | AGCCAGGGAGCAUCAUUCAUUUA | 1488 | | PSEN2:262U21 sense siNA | B ccAGGGAGcAucAuucAuuTT B | 1820 |
| | | | | stab07 | | |
| 549 | ACCGCUAUGUCUGUAGUGGGGUU | 1489 | | PSEN2:551U21 sense siNA | B cGcuAuGucuGuAGuGGGGTT B | 1821 |
| | | | | stab07 | | |
| 597 | AAGAGCUGACCCUCAAAUACGGA | 1490 | | PSEN2:599U21 sense siNA | B GAGcuGAcccucAAAuAcGTT B | 1822 |
| | | | | stab07 | | |
| 730 | CACGACAUUCACUGAGGACACAC | 1491 | | PSEN2:732U21 sense siNA | B cGAcAuucAcuGAGGAcAcTT B | 1823 |
| | | | | stab07 | | |
| 938 | GUGCUCAAGACCUACAAUGUGGC | 1492 | | PSEN2:940U21 sense siNA | B GcucAAGAccuAcAAuGuGTT B | 1824 |
| | | | | stab07 | | |
| 947 | ACCUACAAUGUGGCCAUGGACUA | 1493 | | PSEN2:949U21 sense siNA | B cuAcAAuGuGGccAuGGAcTT B | 1825 |
| | | | | stab07 | | |
| 2095 | GAGUGUUCCCAAUGCUUUGUCCA | 1494 | | PSEN2:2097U21 sense siNA | B GuGuucccAAuGcuuuGucTT B | 1826 |
| | | | | stab07 | | |
| 104 | UUACUGAUGAAGAAACUGAGGCC | 1487 | | PSEN2:124L21 antisense siNA | cucAGuuucuucAucAGuTsT | 1827 |
| | | | | (1060) stab11 | | |
| 260 | AGCCAGGGAGCAUCAUUCAUUUA | 1488 | | PSEN2:280L21 antisense siNA | AuGAAuGAuGcucccuGGTsT | 1828 |
| | | | | (2620) stab11 | | |
| 549 | ACCGCUAUGUCUGUAGUGGGGUU | 1489 | | PSEN2:569L21 antisense siNA | cccAcuAcAGAcAuAGcGTsT | 1829 |
| | | | | (5510) stab11 | | |
| 597 | AAGAGCUGACCCUCAAAUACGGA | 1490 | | PSEN2:617L21 antisense siNA | cGuAuuuGAGGGucAGcucTsT | 1830 |
| | | | | (599C) stab11 | | |
| 730 | CACGACAUUCACUGAGGACACAC | 1491 | | PSEN2:750L21 antisense siNA | GuGuccucAGuGAAuGucGTsT | 1831 |
| | | | | (732C) stab11 | | |
| 938 | GUGCUCAAGACCUACAAUGUGGC | 1492 | | PSEN2:958L21 antisense siNA | cAcAuuGuAGGucuuGAGcTsT | 1832 |
| | | | | (940C) stab11 | | |
| 947 | ACCUACAAUGUGGCCAUGGACUA | 1493 | | PSEN2:967L21 antisense siNA | GuccAuGGccAcAuuGuAGTsT | 1833 |
| | | | | (949C) stab11 | | |
| 2095 | GAGUGUUCCCAAUGCUUUGUCCA | 1494 | | PSEN2:2115L21 antisense siNA | GAcAAAGcAuuGGGAAcAcTsT | 1834 |
| | | | | (2097C) stab11 | | |
| 104 | UUACUGAUGAAGAAACUGAGGCC | 1487 | | PSEN2:106U21 sense siNA | B AcuGAuGAAGAAAcuGAGGTT B | 1835 |
| | | | | stab18 | | |
| 260 | AGCCAGGGAGCAUCAUUCAUUUA | 1488 | | PSEN2:262U21 sense siNA | B ccAGGGAGcAucAuucAuuTT B | 1836 |
| | | | | stab18 | | |
| 549 | ACCGCUAUGUCUGUAGUGGGGUU | 1489 | | PSEN2:551U21 sense siNA | B cGcuAuGucuGuAGuGGGGTT B | 1837 |
| | | | | stab18 | | |
| 597 | AAGAGCUGACCCUCAAAUACGGA | 1490 | | PSEN2:599U21 sense siNA | B GAGcuGAcccucAAAuAcGTT B | 1838 |
| | | | | stab18 | | |
| 730 | CACGACAUUCACUGAGGACACAC | 1491 | | PSEN2:732U21 sense siNA | B cGAcAuucAcuGAGGAcAcTT B | 1839 |
| | | | | stab18 | | |
| 938 | GUGCUCAAGACCUACAAUGUGGC | 1492 | | PSEN2:940U21 sense siNA | B GcucAAGAccuAcAAuGuGTT B | 1840 |
| | | | | stab18 | | |
| 947 | ACCUACAAUGUGGCCAUGGACUA | 1493 | | PSEN2:949U21 sense siNA | B cuAcAAuGuGGccAuGGAcTT B | 1841 |
| | | | | stab18 | | |
| 2095 | GAGUGUUCCCAAUGCUUUGUCCA | 1494 | | PSEN2:2097U21 sense siNA | B GuGuucccAAuGcuuuGucTT B | 1842 |
| | | | | stab18 | | |
| 104 | UUACUGAUGAAGAAACUGAGGCC | 1487 | 33957 | PSEN2:124L21 antisense siNA | ccucAGuuucuucAucAGuTsT | 1843 |
| | | | | (106C) stab08 | | |
| 260 | AGCCAGGGAGCAUCAUUCAUUUA | 1488 | 33958 | PSEN2:280L21 antisense siNA | AAuGAAuGAuGcucccuGGTsT | 1844 |
| | | | | (262C) stab08 | | |
| 549 | ACCGCUAUGUCUGUAGUGGGGUU | 1489 | 33959 | PSEN2:569L21 antisense siNA | ccccAcuAcAGAcAuAGcGTsT | 1845 |
| | | | | (551C) stab08 | | |
| 597 | AAGAGCUGACCCUCAAAUACGGA | 1490 | 33960 | PSEN2:617L21 antisense siNA | cGuAuuuGAGGGucAGcucTsT | 1846 |
| | | | | (599C) stab08 | | |
| 730 | CACGACAUUCACUGAGGACACAC | 1491 | 33961 | PSEN2:750L21 antisense siNA | GuGuccucAGuGAAuGucGTsT | 1847 |
| | | | | (732C) stab08 | | |
| 938 | GUGCUCAAGACCUACAAUGUGGC | 1492 | 33962 | PSEN2:958L21 antisense siNA | cAcAuuGuAGGucuuGAGcTsT | 1848 |
| | | | | (940C) stab08 | | |
| 947 | ACCUACAAUGUGGCCAUGGACUA | 1493 | 33963 | PSEN2:967L21 antisense siNA | GuccAuGGccAcAuuGuAGTsT | 1849 |
| | | | | (949C) stab08 | | |
| 2095 | GAGUGUUCCCAAUGCUUUGUCCA | 1494 | 33964 | PSEN2:2115L21 antisense siNA | GAcAAAGcAuuGGGAAcAcTsT | 1850 |
| | | | | (2097C) stab08 | | |
| 104 | UUACUGAUGAAGAXACUGAGGCC | 1487 | 33941 | PSEN2:106U21 sense siNA | B ACUGAUGAAGAAACUGAGGTT B | 1851 |
| | | | | stab09 | | |
| 260 | AGCCAGGGAGCAUCAUUCAUUUA | 1488 | 33942 | PSEN2:262U21 sense siNA | B CCAGGGAGCAUCAUUCAUUTT B | 1852 |
| | | | | stab09 | | |
| 549 | ACCGCUAUGUCUGUAGUGGGGUU | 1489 | 33943 | PSEN2:551U21 sense siNA | B CGCUAUGUCUGUAGUGGGGTT B | 1853 |
| | | | | stab09 | | |
| 597 | AAGAGCUGACCCUCAAAUACGGA | 1490 | 33944 | PSEN2:599U21 sense siNA | B GAGCUGACCCUCAAAUACGTT B | 1854 |
| | | | | stab09 | | |
| 730 | CACGACAUUCACUGAGGACACAC | 1491 | 33945 | PSEN2:732U21 sense siNA | B CGACAUUCACUGAGGACACTT B | 1855 |
| | | | | stab09 | | |
| 938 | GUGCUCAAGACCUACAAUGUGGC | 1492 | 33946 | PSEN2:940U21 sense siNA | B GCUCAAGACCUACAAUGUGTT B | 1856 |
| | | | | stab09 | | |
| 947 | ACCUACAAUGUGGCCAUGGACUA | 1493 | 33947 | PSEN2:949U21 sense siNA | B CUACAAUGUGGCCAUGGACTT B | 1857 |
| | | | | stab09 | | |
| 2095 | GAGUGUUCCCAAUGCUUUGUCCA | 1494 | 33948 | PSEN2:2097U21 sense siNA | B GUGUUCCCAAUGCUUUGUCTT B | 1858 |
| | | | | stab09 | | |
| 104 | UUACUGAUGAAGAAACUGAGGCC | 1487 | 33949 | PSEN2:124L21 antisense siNA | CCUCAGUUUCUUCAUCAGUTsT | 1859 |
| | | | | (106C) stab10 | | |
| 260 | AGCCAGGGAGCAUCAUUCAUUUA | 1488 | 33950 | PSEN2:280L21 antisense siNA | AAUGAAUGAUGCUCCCUGGTsT | 1860 |
| | | | | (262C) stab10 | | |
| 549 | ACCGCUAUGUCUGUAGUGGGGUU | 1489 | 33951 | PSEN2:569L21 antisense siNA | CCCCACUACAGACAUAGCGTsT | 1861 |
| | | | | (551C) stab10 | | |
| 597 | AAGAGCUGACCCUCAAAUACGGA | 1490 | 33952 | PSEN2:617L21 antisense siNA | CGUAUUUGAGGGUCAGCUCTsT | 1862 |
| | | | | (599C) stab10 | | |
| 730 | CACGACAUUCACUGAGGACACAC | 1491 | 33953 | PSEN2:750L21 antisense siNA | GUGUCCUCAGUGAAUGUCGTsT | 1863 |
| | | | | (732C) stab10 | | |
| 938 | GUGCUCAAGACCUACAAUGUGGC | 1492 | 33954 | PSEN2:958L21 antisense siNA | CACAUUGUAGGUCUUGAGCTsT | 1864 |
| | | | | (940C) stab10 | | |
| 947 | ACCUACAAUGUGGCCAUGGACUA | 1493 | 33955 | PSEN2:967L21 antisense siNA | GUCCAUGGCCACAUUGUAGTsT | 1865 |
| | | | | (949C) stab10 | | |
| 2095 | GAGUGUUCCCAAUGCUUUGUCCA | 1494 | 33956 | PSEN2:2115L21 antisense siNA | GACAAAGCAUUGGGAACACTsT | 1866 |
| | | | | (2097C) stab10 | | |
| 104 | UUACUGAUGAAGAAACUGAGGCC | 1487 | | PSEN2:124L21 antisense siNA | ccucAGuuucuucAucAGuTT B | 1867 |
| | | | | (106C) stab19 | | |
| 260 | AGCCAGGGAGCAUCAUUCAUUUA | 1488 | | PSEN2:280L21 antisense siNA | AAuGAAuGAuGcucccuGGTT B | 1868 |
| | | | | (262C) stab19 | | |
| 549 | ACCGCUAUGUCUGUAGUGGGGUU | 1489 | | PSEN2:569L21 antisense siNA | ccccAcuAcAGAcAuAGcGTT B | 1869 |
| | | | | (551C) stab19 | | |
| 597 | AAGAGCUGACCCUCAAAUACGGA | 1490 | | PSEN2:617L21 antisense siNA | cGuAuuuGAGGGucAGcucTT B | 1870 |
| | | | | (599C) stab19 | | |
| 730 | CACGACAUUCACUGAGGACACAC | 1491 | | PSEN2:750L21 antisense siNA | GuGuccucAGuGAAuGucGTT B | 1871 |
| | | | | (732C) stab19 | | |
| 938 | GUGCUCAAGACCUACAAUGUGGC | 1492 | | PSEN2:958L21 antisense siNA | cAcAuuGuAGGucuuGAGcTT B | 1872 |
| | | | | (940C) stab19 | | |
| 947 | ACCUACAAUGUGGCCAUGGACUA | 1493 | | PSEN2:967L21 antisense siNA | GuccAuGGccAcAuuGuAGTT B | 1873 |
| | | | | (949C) stab19 | | |
| 2095 | GAGUGUUCCCAAUGCUUUGUCCA | 1494 | | PSEN2:2115L21 antisense siNA | GAcAAAGcAuuGGGAAcAcTT B | 1874 |
| | | | | (2097C) stab19 | | |
| 104 | UUACUGAUGAAGAAACUGAGGCC | 1487 | | PSEN2:124L21 antisense siNA | CCUCAGUUUCUUCAUCAGUTT B | 1875 |
| | | | | (106C) stab22 | | |
| 260 | AGCCAGGGAGCAUCAUUCAUUUA | 1488 | | PSEN2:280L21 antisense siNA | AAUGAAUGAUGCUCCCUGGTT B | 1876 |
| | | | | (262C) stab22 | | |
| 549 | ACCGCUAUGUCUGUAGUGGGGUU | 1489 | | PSEN2:569L21 antisense siNA | CCCCACUACAGACAUAGCGTT B | 1877 |
| | | | | (551C) stab22 | | |
| 597 | AAGAGCUGACCCUCAAAUACGGA | 1490 | | PSEN2:617L21 antisense siNA | CGUAUUUGAGGGUCAGCUCTT B | 1878 |
| | | | | (599C) stab22 | | |
| 730 | CACGACAUUCACUGAGGACACAC | 1491 | | PSEN2:750L21 antisense siNA | GUGUCCUCAGUGAAUGUCGTT B | 1879 |
| | | | | (732C) stab22 | | |
| 938 | GUGCUCAAGACCUACAAUGUGGC | 1492 | | PSEN2:958L21 antisense siNA | CACAUUGUAGGUCUUGAGCTT B | 1880 |
| | | | | (940C) stab22 | | |
| 947 | ACCUACAAUGUGGCCAUGGACUA | 1493 | | PSEN2:967L21 antisense siNA | GUCCAUGGCCACAUUGUAGTT B | 1881 |
| | | | | (949C) stab22 | | |
| 2095 | GAGUGUUCCCAAUGCUUUGUCCA | 1494 | | PSEN2:2115L21 antisense siNA | GACAAAGCAUUGGGAACACTT B | 1882 |
| | | | | (2097C) stab22 | | |

Uppercase = ribonucleotide
u,c = 2′-deoxy-2′-fluoro U,C
T = thymidine
B = inverted deoxy abasic
s = phosphorothioate linkage
A = deoxy Adenosine
G = deoxy Guanosine
G = 2′-O-methyl Guanosine
A = 2′-O-methyl Adenosine

[0422] TABLE IV
Non-limiting examples of Stabilization Chemistries
for chemically modified siNA constructs

| Chemistry | pyrimidine | Purine | cap | p = S | Strand |
|---|---|---|---|---|---|
| “Stab 00” | Ribo | Ribo | TT at | | S/AS |
| | | | 3′-ends | | |
| “Stab 1” | Ribo | Ribo | — | 5 at 5′-end | S/AS |
| | | | | 1 at 3′-end | |
| “Stab 2” | Ribo | Ribo | — | All | Usually AS |
| | | | | linkages | |
| “Stab 3” | 2′-fluoro | Ribo | — | 4 at 5′-end | Usually S |
| | | | | 4 at 3′-end | |
| “Stab 4” | 2′-fluoro | Ribo | 5′ and | — | Usually S |
| | | | 3′-ends | | |
| “Stab 5” | 2′-fluoro | Ribo | — | 1 at 3′-end | Usually AS |
| “Stab 6” | 2′-O-Methyl | Ribo | 5′ and | — | Usually S |
| | | | 3′-ends | | |
| “Stab 7” | 2′-fluoro | 2′-deoxy | 5′ and | — | Usually S |
| | | | 3′-ends | | |
| “Stab 8” | 2′-fluoro | 2′-O-Methyl | — | 1 at 3′-end | Usually AS |
| “Stab 9” | Ribo | Ribo | 5′ and | — | Usually S |
| | | | 3′-ends | | |
| “Stab 10” | Ribo | Ribo | — | 1 at 3′-end | Usually AS |
| “Stab 11” | 2′-fluoro | 2′-deoxy | — | 1 at 3′-end | Usually AS |
| “Stab 12” | 2′-fluoro | LNA | 5′ and | | Usually S |
| | | | 3′-ends | | |
| “Stab 13” | 2′-fluoro | LNA | | 1 at 3′-end | Usually AS |
| “Stab 14” | 2′-fluoro | 2′-deoxy | | 2 at 5′-end | Usually AS |
| | | | | 1 at 3′-end | |
| “Stab 15” | 2′-deoxy | 2′-deoxy | | 2 at 5′-end | Usually AS |
| | | | | 1 at 3′-end | |
| “Stab 16 | Ribo | 2′-O- | 5′ and | | Usually S |
| | | Methyl | 3′-ends | | |
| “Stab 17” | 2′-O-Methyl | 2′-O- | 5′ and | | Usually S |
| | | Methyl | 3′-ends | | |
| “Stab 18” | 2′-fluoro | 2′-O-Methyl | 5′ and | | Usually S |
| | | | 3′-ends | | |
| “Stab 19” | 2′-fluoro | 2′-O- | 3′-end | | Usually AS |
| | | Methyl | | | |
| “Stab 20” | 2′-fluoro | 2′-deoxy | 3′-end | | Usually AS |
| “Stab 21” | 2′-fluoro | Ribo | 3′-end | | Usually AS |
| “Stab 22” | Ribo | Ribo | 3′-end- | | Usually AS |
| “Stab 23” | 2′-fluoro* | 2′-deoxy* | 5′ and | | Usually S |
| | | | 3′-ends | | |
| “Stab 24” | 2′-fluoro* | 2′-O-Methyl* | — | 1 at 3′-end | Usually AS |
| “Stab 25” | 2′-fluoro* | 2′-O-Methyl* | — | 1 at 3′-end | Usually AS |

CAP = any terminal cap, see for example FIG. 10.
All Stab 00-25 chemistries can comprise 3′-terminal thymidine (TT) residues
All Stab 00-25 chemistries typically comprise about 21 nucleotides, but can vary as described herein.
S = sense strand
AS = antisense strand
*Stab 23 has single ribonucleotide adjacent to 3′-CAP
*Stab 24 has single ribonucleotide at 5′-terminus
*Stab 25 has three ribonucleotides at 5′-terminus

[0423] TABLE V

| | | | | | |
|---|---|---|---|---|---|
| | | | | Wait Time* | |
| Reagent | Equivalents | Amount | Wait Time* DNA | 2′-O-methyl | Wait Time*RNA |

A. 2.5 μmol Synthesis Cycle ABI 394 Instrument

| | | | | | | | | | |
|---|---|---|---|---|---|---|---|---|---|
| Phosphoramidites | 6.5 | 163 | μL | 45 | sec | 2.5 | min | 7.5 | min |
| S-Ethyl Tetrazole | 23.8 | 238 | μL | 45 | sec | 2.5 | min | 7.5 | min |
| Acetic Anhydride | 100 | 233 | μL | 5 | sec | 5 | sec | 5 | sec |
| N-Methyl | 186 | 233 | μL | 5 | sec | 5 | sec | 5 | sec |
| Imidazole | | | | | | | | | |
| TCA | 176 | 2.3 | mL | 21 | sec | 21 | sec | 21 | sec |
| Iodine | 11.2 | 1.7 | mL | 45 | sec | 45 | sec | 45 | sec |
| Beaucage | 12.9 | 645 | μL | 100 | sec | 300 | sec | 300 | sec |

| | | | | | | |
|---|---|---|---|---|---|---|
| Acetonitrile | NA | 6.67 | mL | NA | NA | NA |

B. 0.2 μmol Synthesis Cycle ABI 394 Instrument

| | | | | | | | | | |
|---|---|---|---|---|---|---|---|---|---|
| Phosphoramidites | 15 | 31 | μL | 45 | sec | 233 | sec | 465 | sec |
| S-Ethyl Tetrazole | 38.7 | 31 | μL | 45 | sec | 233 | min | 465 | sec |
| Acetic Anhydride | 655 | 124 | μL | 5 | sec | 5 | sec | 5 | sec |
| N-Methyl | 1245 | 124 | μL | 5 | sec | 5 | sec | 5 | sec |
| Imidazole | | | | | | | | | |
| TCA | 700 | 732 | μL | 10 | sec | 10 | sec | 10 | sec |
| Iodine | 20.6 | 244 | μL | 15 | sec | 15 | sec | 15 | sec |
| Beaucage | 7.7 | 232 | μL | 100 | sec | 300 | sec | 300 | sec |

| | | | | | | |
|---|---|---|---|---|---|---|
| Acetonitrile | NA | 2.64 | mL | NA | NA | NA |

| | | | | | |
|---|---|---|---|---|---|
| | Equivalents: | | | | |
| | DNA/2′-O- | Amount: DNA/2′-O- | Wait Time* | Wait Time* | Wait Time* |
| Reagent | methyl/Ribo | methyl/Ribo | DNA | 2′-O-methyl | Ribo |

C. 0.2 μmol Synthesis Cycle 96 well Instrument

| | | | | | | | | | |
|---|---|---|---|---|---|---|---|---|---|
| Phosphoramidites | 22/33/66 | 40/60/120 | μL | 60 | sec | 180 | sec | 360 | sec |
| S-Ethyl Tetrazole | 70/105/210 | 40/60/120 | μL | 60 | sec | 180 | min | 360 | sec |
| Acetic Anhydride | 265/265/265 | 50/50/50 | μL | 10 | sec | 10 | sec | 10 | sec |
| N-Methyl | 502/502/502 | 50/50/50 | μL | 10 | sec | 10 | sec | 10 | sec |
| Imidazole | | | | | | | | | |
| TCA | 238/475/475 | 250/500/500 | μL | 15 | sec | 15 | sec | 15 | sec |
| Iodine | 6.8/6.8/6.8 | 80/80/80 | μL | 30 | sec | 30 | sec | 30 | sec |
| Beaucage | 34/51/51 | 80/120/120 | | 100 | sec | 200 | sec | 200 | sec |

| | | | | | | |
|---|---|---|---|---|---|---|
| Acetonitrile | NA | 1150/1150/1150 | μL | NA | NA | NA |

*Wait time does not include contact time during delivery.
*Tandem synthesis utilizes double coupling of linker molecule

The application's sequence listing, which the Patent Office published only in electronic form, follows.

SEQUENCE LISTING (1904 sequences)

SEQ ID NO: 1 - RNA, 19 nt, Artificial Sequence
  Description of Artificial Sequence:  Target Sequence/siNA sense region
uuuccucggcagcgguagg

SEQ ID NO: 2 - RNA, 19 nt, Artificial Sequence
  Description of Artificial Sequence:  Target Sequence/siNA sense region
gcgagagcacgcggaggag

SEQ ID NO: 3 - RNA, 19 nt, Artificial Sequence
  Description of Artificial Sequence:  Target Sequence/siNA sense region
gcgugcgcgggggccccgg

SEQ ID NO: 4 - RNA, 19 nt, Artificial Sequence
  Description of Artificial Sequence:  Target Sequence/siNA sense region
ggagacggcggcgguggcg

SEQ ID NO: 5 - RNA, 19 nt, Artificial Sequence
  Description of Artificial Sequence:  Target Sequence/siNA sense region
ggcgcgggcagagcaagga

SEQ ID NO: 6 - RNA, 19 nt, Artificial Sequence
  Description of Artificial Sequence:  Target Sequence/siNA sense region
acgcggcggaucccacucg

SEQ ID NO: 7 - RNA, 19 nt, Artificial Sequence
  Description of Artificial Sequence:  Target Sequence/siNA sense region
gcacagcagcgcacucggu

SEQ ID NO: 8 - RNA, 19 nt, Artificial Sequence
  Description of Artificial Sequence:  Target Sequence/siNA sense region
ugccccgcgcagggucgcg

SEQ ID NO: 9 - RNA, 19 nt, Artificial Sequence
  Description of Artificial Sequence:  Target Sequence/siNA sense region
gaugcugcccgguuuggca

SEQ ID NO: 10 - RNA, 19 nt, Artificial Sequence
  Description of Artificial Sequence:  Target Sequence/siNA sense region
acugcuccugcuggccgcc

SEQ ID NO: 11 - RNA, 19 nt, Artificial Sequence
  Description of Artificial Sequence:  Target Sequence/siNA sense region
cuggacggcucgggcgcug

SEQ ID NO: 12 - RNA, 19 nt, Artificial Sequence
  Description of Artificial Sequence:  Target Sequence/siNA sense region
ggagguacccacugauggu

SEQ ID NO: 13 - RNA, 19 nt, Artificial Sequence
  Description of Artificial Sequence:  Target Sequence/siNA sense region
uaaugcuggccugcuggcu

SEQ ID NO: 14 - RNA, 19 nt, Artificial Sequence
  Description of Artificial Sequence:  Target Sequence/siNA sense region
ugaaccccagauugccaug

SEQ ID NO: 15 - RNA, 19 nt, Artificial Sequence
  Description of Artificial Sequence:  Target Sequence/siNA sense region
guucuguggcagacugaac

SEQ ID NO: 16 - RNA, 19 nt, Artificial Sequence
  Description of Artificial Sequence:  Target Sequence/siNA sense region
caugcacaugaauguccag

SEQ ID NO: 17 - RNA, 19 nt, Artificial Sequence
  Description of Artificial Sequence:  Target Sequence/siNA sense region
gaaugggaagugggauuca

SEQ ID NO: 18 - RNA, 19 nt, Artificial Sequence
  Description of Artificial Sequence:  Target Sequence/siNA sense region
agauccaucagggaccaaa

SEQ ID NO: 19 - RNA, 19 nt, Artificial Sequence
  Description of Artificial Sequence:  Target Sequence/siNA sense region
aaccugcauugauaccaag

SEQ ID NO: 20 - RNA, 19 nt, Artificial Sequence
  Description of Artificial Sequence:  Target Sequence/siNA sense region
ggaaggcauccugcaguau

SEQ ID NO: 21 - RNA, 19 nt, Artificial Sequence
  Description of Artificial Sequence:  Target Sequence/siNA sense region
uugccaagaagucuacccu

SEQ ID NO: 22 - RNA, 19 nt, Artificial Sequence
  Description of Artificial Sequence:  Target Sequence/siNA sense region
ugaacugcagaucaccaau

SEQ ID NO: 23 - RNA, 19 nt, Artificial Sequence
  Description of Artificial Sequence:  Target Sequence/siNA sense region
ugugguagaagccaaccaa

SEQ ID NO: 24 - RNA, 19 nt, Artificial Sequence
  Description of Artificial Sequence:  Target Sequence/siNA sense region
accagugaccauccagaac

SEQ ID NO: 25 - RNA, 19 nt, Artificial Sequence
  Description of Artificial Sequence:  Target Sequence/siNA sense region
cuggugcaagcggggccgc

SEQ ID NO: 26 - RNA, 19 nt, Artificial Sequence
  Description of Artificial Sequence:  Target Sequence/siNA sense region
caagcagugcaagacccau

SEQ ID NO: 27 - RNA, 19 nt, Artificial Sequence
  Description of Artificial Sequence:  Target Sequence/siNA sense region
uccccacuuugugauuccc

SEQ ID NO: 28 - RNA, 19 nt, Artificial Sequence
  Description of Artificial Sequence:  Target Sequence/siNA sense region
cuaccgcugcuuaguuggu

SEQ ID NO: 29 - RNA, 19 nt, Artificial Sequence
  Description of Artificial Sequence:  Target Sequence/siNA sense region
ugaguuuguaagugaugcc

SEQ ID NO: 30 - RNA, 19 nt, Artificial Sequence
  Description of Artificial Sequence:  Target Sequence/siNA sense region
ccuucucguuccugacaag

SEQ ID NO: 31 - RNA, 19 nt, Artificial Sequence
  Description of Artificial Sequence:  Target Sequence/siNA sense region
gugcaaauucuuacaccag

SEQ ID NO: 32 - RNA, 19 nt, Artificial Sequence
  Description of Artificial Sequence:  Target Sequence/siNA sense region
ggagaggauggauguuugc

SEQ ID NO: 33 - RNA, 19 nt, Artificial Sequence
  Description of Artificial Sequence:  Target Sequence/siNA sense region
cgaaacucaucuucacugg

SEQ ID NO: 34 - RNA, 19 nt, Artificial Sequence
  Description of Artificial Sequence:  Target Sequence/siNA sense region
gcacaccgucgccaaagag

SEQ ID NO: 35 - RNA, 19 nt, Artificial Sequence
  Description of Artificial Sequence:  Target Sequence/siNA sense region
gacaugcagugagaagagu

SEQ ID NO: 36 - RNA, 19 nt, Artificial Sequence
  Description of Artificial Sequence:  Target Sequence/siNA sense region
uaccaacuugcaugacuac

SEQ ID NO: 37 - RNA, 19 nt, Artificial Sequence
  Description of Artificial Sequence:  Target Sequence/siNA sense region
cggcauguugcugcccugc

SEQ ID NO: 38 - RNA, 19 nt, Artificial Sequence
  Description of Artificial Sequence:  Target Sequence/siNA sense region
cggaauugacaaguuccga

SEQ ID NO: 39 - RNA, 19 nt, Artificial Sequence
  Description of Artificial Sequence:  Target Sequence/siNA sense region
agggguagaguuugugugu

SEQ ID NO: 40 - RNA, 19 nt, Artificial Sequence
  Description of Artificial Sequence:  Target Sequence/siNA sense region
uugcccacuggcugaagaa

SEQ ID NO: 41 - RNA, 19 nt, Artificial Sequence
  Description of Artificial Sequence:  Target Sequence/siNA sense region
aagugacaauguggauucu

SEQ ID NO: 42 - RNA, 19 nt, Artificial Sequence
  Description of Artificial Sequence:  Target Sequence/siNA sense region
ugcugaugcggaggaggau

SEQ ID NO: 43 - RNA, 19 nt, Artificial Sequence
  Description of Artificial Sequence:  Target Sequence/siNA sense region
ugacucggaugucuggugg

SEQ ID NO: 44 - RNA, 19 nt, Artificial Sequence
  Description of Artificial Sequence:  Target Sequence/siNA sense region
gggcggagcagacacagac

SEQ ID NO: 45 - RNA, 19 nt, Artificial Sequence
  Description of Artificial Sequence:  Target Sequence/siNA sense region
cuaugcagaugggagugaa

SEQ ID NO: 46 - RNA, 19 nt, Artificial Sequence
  Description of Artificial Sequence:  Target Sequence/siNA sense region
agacaaaguaguagaagua

SEQ ID NO: 47 - RNA, 19 nt, Artificial Sequence
  Description of Artificial Sequence:  Target Sequence/siNA sense region
agcagaggaggaagaagug

SEQ ID NO: 48 - RNA, 19 nt, Artificial Sequence
  Description of Artificial Sequence:  Target Sequence/siNA sense region
ggcugagguggaagaagaa

SEQ ID NO: 49 - RNA, 19 nt, Artificial Sequence
  Description of Artificial Sequence:  Target Sequence/siNA sense region
agaagccgaugaugacgag

SEQ ID NO: 50 - RNA, 19 nt, Artificial Sequence
  Description of Artificial Sequence:  Target Sequence/siNA sense region
ggacgaugaggauggugau

SEQ ID NO: 51 - RNA, 19 nt, Artificial Sequence
  Description of Artificial Sequence:  Target Sequence/siNA sense region
ugagguagaggaagaggcu

SEQ ID NO: 52 - RNA, 19 nt, Artificial Sequence
  Description of Artificial Sequence:  Target Sequence/siNA sense region
ugaggaacccuacgaagaa

SEQ ID NO: 53 - RNA, 19 nt, Artificial Sequence
  Description of Artificial Sequence:  Target Sequence/siNA sense region
agccacagagagaaccacc

SEQ ID NO: 54 - RNA, 19 nt, Artificial Sequence
  Description of Artificial Sequence:  Target Sequence/siNA sense region
cagcauugccaccaccacc

SEQ ID NO: 55 - RNA, 19 nt, Artificial Sequence
  Description of Artificial Sequence:  Target Sequence/siNA sense region
caccaccaccacagagucu

SEQ ID NO: 56 - RNA, 19 nt, Artificial Sequence
  Description of Artificial Sequence:  Target Sequence/siNA sense region
uguggaagaggugguucga

SEQ ID NO: 57 - RNA, 19 nt, Artificial Sequence
  Description of Artificial Sequence:  Target Sequence/siNA sense region
agaggugugcucugaacaa

SEQ ID NO: 58 - RNA, 19 nt, Artificial Sequence
  Description of Artificial Sequence:  Target Sequence/siNA sense region
agccgagacggggccgugc

SEQ ID NO: 59 - RNA, 19 nt, Artificial Sequence
  Description of Artificial Sequence:  Target Sequence/siNA sense region
ccgagcaaugaucucccgc

SEQ ID NO: 60 - RNA, 19 nt, Artificial Sequence
  Description of Artificial Sequence:  Target Sequence/siNA sense region
cugguacuuugaugugacu

SEQ ID NO: 61 - RNA, 19 nt, Artificial Sequence
  Description of Artificial Sequence:  Target Sequence/siNA sense region
ugaagggaagugugcccca

SEQ ID NO: 62 - RNA, 19 nt, Artificial Sequence
  Description of Artificial Sequence:  Target Sequence/siNA sense region
auucuuuuacggcggaugu

SEQ ID NO: 63 - RNA, 19 nt, Artificial Sequence
  Description of Artificial Sequence:  Target Sequence/siNA sense region
uggcggcaaccggaacaac

SEQ ID NO: 64 - RNA, 19 nt, Artificial Sequence
  Description of Artificial Sequence:  Target Sequence/siNA sense region
cuuugacacagaagaguac

SEQ ID NO: 65 - RNA, 19 nt, Artificial Sequence
  Description of Artificial Sequence:  Target Sequence/siNA sense region
cugcauggccguguguggc

SEQ ID NO: 66 - RNA, 19 nt, Artificial Sequence
  Description of Artificial Sequence:  Target Sequence/siNA sense region
cagcgccaugucccaaagu

SEQ ID NO: 67 - RNA, 19 nt, Artificial Sequence
  Description of Artificial Sequence:  Target Sequence/siNA sense region
uuuacucaagacuacccag

SEQ ID NO: 68 - RNA, 19 nt, Artificial Sequence
  Description of Artificial Sequence:  Target Sequence/siNA sense region
ggaaccucuugcccgagau

SEQ ID NO: 69 - RNA, 19 nt, Artificial Sequence
  Description of Artificial Sequence:  Target Sequence/siNA sense region
uccuguuaaacuuccuaca

SEQ ID NO: 70 - RNA, 19 nt, Artificial Sequence
  Description of Artificial Sequence:  Target Sequence/siNA sense region
aacagcagccaguaccccu

SEQ ID NO: 71 - RNA, 19 nt, Artificial Sequence
  Description of Artificial Sequence:  Target Sequence/siNA sense region
ugaugccguugacaaguau

SEQ ID NO: 72 - RNA, 19 nt, Artificial Sequence
  Description of Artificial Sequence:  Target Sequence/siNA sense region
ucucgagacaccuggggau

SEQ ID NO: 73 - RNA, 19 nt, Artificial Sequence
  Description of Artificial Sequence:  Target Sequence/siNA sense region
ugagaaugaacaugcccau

SEQ ID NO: 74 - RNA, 19 nt, Artificial Sequence
  Description of Artificial Sequence:  Target Sequence/siNA sense region
uuuccagaaagccaaagag

SEQ ID NO: 75 - RNA, 19 nt, Artificial Sequence
  Description of Artificial Sequence:  Target Sequence/siNA sense region
gaggcuugaggccaagcac

SEQ ID NO: 76 - RNA, 19 nt, Artificial Sequence
  Description of Artificial Sequence:  Target Sequence/siNA sense region
ccgagagagaaugucccag

SEQ ID NO: 77 - RNA, 19 nt, Artificial Sequence
  Description of Artificial Sequence:  Target Sequence/siNA sense region
ggucaugagagaaugggaa

SEQ ID NO: 78 - RNA, 19 nt, Artificial Sequence
  Description of Artificial Sequence:  Target Sequence/siNA sense region
agaggcagaacgucaagca

SEQ ID NO: 79 - RNA, 19 nt, Artificial Sequence
  Description of Artificial Sequence:  Target Sequence/siNA sense region
aaagaacuugccuaaagcu

SEQ ID NO: 80 - RNA, 19 nt, Artificial Sequence
  Description of Artificial Sequence:  Target Sequence/siNA sense region
ugauaagaaggcaguuauc

SEQ ID NO: 81 - RNA, 19 nt, Artificial Sequence
  Description of Artificial Sequence:  Target Sequence/siNA sense region
ccagcauuuccaggagaaa

SEQ ID NO: 82 - RNA, 19 nt, Artificial Sequence
  Description of Artificial Sequence:  Target Sequence/siNA sense region
aguggaaucuuuggaacag

SEQ ID NO: 83 - RNA, 19 nt, Artificial Sequence
  Description of Artificial Sequence:  Target Sequence/siNA sense region
ggaagcagccaacgagaga

SEQ ID NO: 84 - RNA, 19 nt, Artificial Sequence
  Description of Artificial Sequence:  Target Sequence/siNA sense region
acagcagcugguggagaca

SEQ ID NO: 85 - RNA, 19 nt, Artificial Sequence
  Description of Artificial Sequence:  Target Sequence/siNA sense region
acacauggccagaguggaa

SEQ ID NO: 86 - RNA, 19 nt, Artificial Sequence
  Description of Artificial Sequence:  Target Sequence/siNA sense region
agccaugcucaaugaccgc

SEQ ID NO: 87 - RNA, 19 nt, Artificial Sequence
  Description of Artificial Sequence:  Target Sequence/siNA sense region
ccgccgccuggcccuggag

SEQ ID NO: 88 - RNA, 19 nt, Artificial Sequence
  Description of Artificial Sequence:  Target Sequence/siNA sense region
gaacuacaucaccgcucug

SEQ ID NO: 89 - RNA, 19 nt, Artificial Sequence
  Description of Artificial Sequence:  Target Sequence/siNA sense region
gcaggcuguuccuccucgg

SEQ ID NO: 90 - RNA, 19 nt, Artificial Sequence
  Description of Artificial Sequence:  Target Sequence/siNA sense region
gccucgucacguguucaau

SEQ ID NO: 91 - RNA, 19 nt, Artificial Sequence
  Description of Artificial Sequence:  Target Sequence/siNA sense region
uaugcuaaagaaguauguc

SEQ ID NO: 92 - RNA, 19 nt, Artificial Sequence
  Description of Artificial Sequence:  Target Sequence/siNA sense region
ccgcgcagaacagaaggac

SEQ ID NO: 93 - RNA, 19 nt, Artificial Sequence
  Description of Artificial Sequence:  Target Sequence/siNA sense region
cagacagcacacccuaaag

SEQ ID NO: 94 - RNA, 19 nt, Artificial Sequence
  Description of Artificial Sequence:  Target Sequence/siNA sense region
gcauuucgagcaugugcgc

SEQ ID NO: 95 - RNA, 19 nt, Artificial Sequence
  Description of Artificial Sequence:  Target Sequence/siNA sense region
caugguggaucccaagaaa

SEQ ID NO: 96 - RNA, 19 nt, Artificial Sequence
  Description of Artificial Sequence:  Target Sequence/siNA sense region
agccgcucagauccggucc

SEQ ID NO: 97 - RNA, 19 nt, Artificial Sequence
  Description of Artificial Sequence:  Target Sequence/siNA sense region
ccagguuaugacacaccuc

SEQ ID NO: 98 - RNA, 19 nt, Artificial Sequence
  Description of Artificial Sequence:  Target Sequence/siNA sense region
ccgugugauuuaugagcgc

SEQ ID NO: 99 - RNA, 19 nt, Artificial Sequence
  Description of Artificial Sequence:  Target Sequence/siNA sense region
caugaaucagucucucucc

SEQ ID NO: 100 - RNA, 19 nt, Artificial Sequence
  Description of Artificial Sequence:  Target Sequence/siNA sense region
ccugcucuacaacgugccu

SEQ ID NO: 101 - RNA, 19 nt, Artificial Sequence
  Description of Artificial Sequence:  Target Sequence/siNA sense region
ugcaguggccgaggagauu

SEQ ID NO: 102 - RNA, 19 nt, Artificial Sequence
  Description of Artificial Sequence:  Target Sequence/siNA sense region
ucaggaugaaguugaugag

SEQ ID NO: 103 - RNA, 19 nt, Artificial Sequence
  Description of Artificial Sequence:  Target Sequence/siNA sense region
gcugcuucagaaagagcaa

SEQ ID NO: 104 - RNA, 19 nt, Artificial Sequence
  Description of Artificial Sequence:  Target Sequence/siNA sense region
aaacuauucagaugacguc

SEQ ID NO: 105 - RNA, 19 nt, Artificial Sequence
  Description of Artificial Sequence:  Target Sequence/siNA sense region
cuuggccaacaugauuagu

SEQ ID NO: 106 - RNA, 19 nt, Artificial Sequence
  Description of Artificial Sequence:  Target Sequence/siNA sense region
ugaaccaaggaucaguuac

SEQ ID NO: 107 - RNA, 19 nt, Artificial Sequence
  Description of Artificial Sequence:  Target Sequence/siNA sense region
cggaaacgaugcucucaug

SEQ ID NO: 108 - RNA, 19 nt, Artificial Sequence
  Description of Artificial Sequence:  Target Sequence/siNA sense region
gccaucuuugaccgaaacg

SEQ ID NO: 109 - RNA, 19 nt, Artificial Sequence
  Description of Artificial Sequence:  Target Sequence/siNA sense region
gaaaaccaccguggagcuc

SEQ ID NO: 110 - RNA, 19 nt, Artificial Sequence
  Description of Artificial Sequence:  Target Sequence/siNA sense region
ccuucccgugaauggagag

SEQ ID NO: 111 - RNA, 19 nt, Artificial Sequence
  Description of Artificial Sequence:  Target Sequence/siNA sense region
guucagccuggacgaucuc

SEQ ID NO: 112 - RNA, 19 nt, Artificial Sequence
  Description of Artificial Sequence:  Target Sequence/siNA sense region
ccagccguggcauucuuuu

SEQ ID NO: 113 - RNA, 19 nt, Artificial Sequence
  Description of Artificial Sequence:  Target Sequence/siNA sense region
uggggcugacucugugcca

SEQ ID NO: 114 - RNA, 19 nt, Artificial Sequence
  Description of Artificial Sequence:  Target Sequence/siNA sense region
agccaacacagaaaacgaa

SEQ ID NO: 115 - RNA, 19 nt, Artificial Sequence
  Description of Artificial Sequence:  Target Sequence/siNA sense region
aguugagccuguugaugcc

SEQ ID NO: 116 - RNA, 19 nt, Artificial Sequence
  Description of Artificial Sequence:  Target Sequence/siNA sense region
ccgcccugcugccgaccga

SEQ ID NO: 117 - RNA, 19 nt, Artificial Sequence
  Description of Artificial Sequence:  Target Sequence/siNA sense region
aggacugaccacucgacca

SEQ ID NO: 118 - RNA, 19 nt, Artificial Sequence
  Description of Artificial Sequence:  Target Sequence/siNA sense region
agguucuggguugacaaau

SEQ ID NO: 119 - RNA, 19 nt, Artificial Sequence
  Description of Artificial Sequence:  Target Sequence/siNA sense region
uaucaagacggaggagauc

SEQ ID NO: 120 - RNA, 19 nt, Artificial Sequence
  Description of Artificial Sequence:  Target Sequence/siNA sense region
cucugaagugaagauggau

SEQ ID NO: 121 - RNA, 19 nt, Artificial Sequence
  Description of Artificial Sequence:  Target Sequence/siNA sense region
ugcagaauuccgacaugac

SEQ ID NO: 122 - RNA, 19 nt, Artificial Sequence
  Description of Artificial Sequence:  Target Sequence/siNA sense region
cucaggauaugaaguucau

SEQ ID NO: 123 - RNA, 19 nt, Artificial Sequence
  Description of Artificial Sequence:  Target Sequence/siNA sense region
ucaucaaaaauugguguuc

SEQ ID NO: 124 - RNA, 19 nt, Artificial Sequence
  Description of Artificial Sequence:  Target Sequence/siNA sense region
cuuugcagaagaugugggu

SEQ ID NO: 125 - RNA, 19 nt, Artificial Sequence
  Description of Artificial Sequence:  Target Sequence/siNA sense region
uucaaacaaaggugcaauc

SEQ ID NO: 126 - RNA, 19 nt, Artificial Sequence
  Description of Artificial Sequence:  Target Sequence/siNA sense region
cauuggacucauggugggc

SEQ ID NO: 127 - RNA, 19 nt, Artificial Sequence
  Description of Artificial Sequence:  Target Sequence/siNA sense region
cgguguugucauagcgaca

SEQ ID NO: 128 - RNA, 19 nt, Artificial Sequence
  Description of Artificial Sequence:  Target Sequence/siNA sense region
agugaucgucaucaccuug

SEQ ID NO: 129 - RNA, 19 nt, Artificial Sequence
  Description of Artificial Sequence:  Target Sequence/siNA sense region
ggugaugcugaagaagaaa

SEQ ID NO: 130 - RNA, 19 nt, Artificial Sequence
  Description of Artificial Sequence:  Target Sequence/siNA sense region
acaguacacauccauucau

SEQ ID NO: 131 - RNA, 19 nt, Artificial Sequence
  Description of Artificial Sequence:  Target Sequence/siNA sense region
ucauggugugguggagguu

SEQ ID NO: 132 - RNA, 19 nt, Artificial Sequence
  Description of Artificial Sequence:  Target Sequence/siNA sense region
ugacgccgcugucacccca

SEQ ID NO: 133 - RNA, 19 nt, Artificial Sequence
  Description of Artificial Sequence:  Target Sequence/siNA sense region
agaggagcgccaccugucc

SEQ ID NO: 134 - RNA, 19 nt, Artificial Sequence
  Description of Artificial Sequence:  Target Sequence/siNA sense region
caagaugcagcagaacggc

SEQ ID NO: 135 - RNA, 19 nt, Artificial Sequence
  Description of Artificial Sequence:  Target Sequence/siNA sense region
cuacgaaaauccaaccuac

SEQ ID NO: 136 - RNA, 19 nt, Artificial Sequence
  Description of Artificial Sequence:  Target Sequence/siNA sense region
caaguucuuugagcagaug

SEQ ID NO: 137 - RNA, 19 nt, Artificial Sequence
  Description of Artificial Sequence:  Target Sequence/siNA sense region
gcagaacuagacccccgcc

SEQ ID NO: 138 - RNA, 19 nt, Artificial Sequence
  Description of Artificial Sequence:  Target Sequence/siNA sense region
cacagcagccucugaaguu

SEQ ID NO: 139 - RNA, 19 nt, Artificial Sequence
  Description of Artificial Sequence:  Target Sequence/siNA sense region
uggacagcaaaaccauugc

SEQ ID NO: 140 - RNA, 19 nt, Artificial Sequence
  Description of Artificial Sequence:  Target Sequence/siNA sense region
cuucacuacccaucggugu

SEQ ID NO: 141 - RNA, 19 nt, Artificial Sequence
  Description of Artificial Sequence:  Target Sequence/siNA sense region
uccauuuauagaauaaugu

SEQ ID NO: 142 - RNA, 19 nt, Artificial Sequence
  Description of Artificial Sequence:  Target Sequence/siNA sense region
ugggaagaaacaaacccgu

SEQ ID NO: 143 - RNA, 19 nt, Artificial Sequence
  Description of Artificial Sequence:  Target Sequence/siNA sense region
uuuuaugauuuacucauua

SEQ ID NO: 144 - RNA, 19 nt, Artificial Sequence
  Description of Artificial Sequence:  Target Sequence/siNA sense region
aucgccuuuugacagcugu

SEQ ID NO: 145 - RNA, 19 nt, Artificial Sequence
  Description of Artificial Sequence:  Target Sequence/siNA sense region
ugcuguaacacaaguagau

SEQ ID NO: 146 - RNA, 19 nt, Artificial Sequence
  Description of Artificial Sequence:  Target Sequence/siNA sense region
ugccugaacuugaauuaau

SEQ ID NO: 147 - RNA, 19 nt, Artificial Sequence
  Description of Artificial Sequence:  Target Sequence/siNA sense region
uccacacaucaguaaugua

SEQ ID NO: 148 - RNA, 19 nt, Artificial Sequence
  Description of Artificial Sequence:  Target Sequence/siNA sense region
auucuaucucucuuuacau

SEQ ID NO: 149 - RNA, 19 nt, Artificial Sequence
  Description of Artificial Sequence:  Target Sequence/siNA sense region
uuuuggucucuauacuaca

SEQ ID NO: 150 - RNA, 19 nt, Artificial Sequence
  Description of Artificial Sequence:  Target Sequence/siNA sense region
auuauuaauggguuuugug

SEQ ID NO: 151 - RNA, 19 nt, Artificial Sequence
  Description of Artificial Sequence:  Target Sequence/siNA sense region
guacuguaaagaauuuagc

SEQ ID NO: 152 - RNA, 19 nt, Artificial Sequence
  Description of Artificial Sequence:  Target Sequence/siNA sense region
cuguaucaaacuagugcau

SEQ ID NO: 153 - RNA, 19 nt, Artificial Sequence
  Description of Artificial Sequence:  Target Sequence/siNA sense region
ugaauagauucucuccuga

SEQ ID NO: 154 - RNA, 19 nt, Artificial Sequence
  Description of Artificial Sequence:  Target Sequence/siNA sense region
auuauuuaucacauagccc

SEQ ID NO: 155 - RNA, 19 nt, Artificial Sequence
  Description of Artificial Sequence:  Target Sequence/siNA sense region
ccuuagccaguuguauauu

SEQ ID NO: 156 - RNA, 19 nt, Artificial Sequence
  Description of Artificial Sequence:  Target Sequence/siNA sense region
uauucuugugguuugugac

SEQ ID NO: 157 - RNA, 19 nt, Artificial Sequence
  Description of Artificial Sequence:  Target Sequence/siNA sense region
cccaauuaaguccuacuuu

SEQ ID NO: 158 - RNA, 19 nt, Artificial Sequence
  Description of Artificial Sequence:  Target Sequence/siNA sense region
uacauaugcuuuaagaauc

SEQ ID NO: 159 - RNA, 19 nt, Artificial Sequence
  Description of Artificial Sequence:  Target Sequence/siNA sense region
cgaugggggaugcuucaug

SEQ ID NO: 160 - RNA, 19 nt, Artificial Sequence
  Description of Artificial Sequence:  Target Sequence/siNA sense region
gugaacgugggaguucagc

SEQ ID NO: 161 - RNA, 19 nt, Artificial Sequence
  Description of Artificial Sequence:  Target Sequence/siNA sense region
cugcuucucuugccuaagu

SEQ ID NO: 162 - RNA, 19 nt, Artificial Sequence
  Description of Artificial Sequence:  Target Sequence/siNA sense region
uauuccuuuccugaucacu

SEQ ID NO: 163 - RNA, 19 nt, Artificial Sequence
  Description of Artificial Sequence:  Target Sequence/siNA sense region
uaugcauuuuaaaguuaaa

SEQ ID NO: 164 - RNA, 19 nt, Artificial Sequence
  Description of Artificial Sequence:  Target Sequence/siNA sense region
acauuuuuaaguauuucag

SEQ ID NO: 165 - RNA, 19 nt, Artificial Sequence
  Description of Artificial Sequence:  Target Sequence/siNA sense region
gaugcuuuagagagauuuu

SEQ ID NO: 166 - RNA, 19 nt, Artificial Sequence
  Description of Artificial Sequence:  Target Sequence/siNA sense region
uuuuuccaugacugcauuu

SEQ ID NO: 167 - RNA, 19 nt, Artificial Sequence
  Description of Artificial Sequence:  Target Sequence/siNA sense region
uuacuguacagauugcugc

SEQ ID NO: 168 - RNA, 19 nt, Artificial Sequence
  Description of Artificial Sequence:  Target Sequence/siNA sense region
cuucugcuauauuugugau

SEQ ID NO: 169 - RNA, 19 nt, Artificial Sequence
  Description of Artificial Sequence:  Target Sequence/siNA sense region
uauaggaauuaagaggaua

SEQ ID NO: 170 - RNA, 19 nt, Artificial Sequence
  Description of Artificial Sequence:  Target Sequence/siNA sense region
acacacguuuguuucuucg

SEQ ID NO: 171 - RNA, 19 nt, Artificial Sequence
  Description of Artificial Sequence:  Target Sequence/siNA sense region
gugccuguuuuaugugcac

SEQ ID NO: 172 - RNA, 19 nt, Artificial Sequence
  Description of Artificial Sequence:  Target Sequence/siNA sense region
cacauuaggcauugagacu

SEQ ID NO: 173 - RNA, 19 nt, Artificial Sequence
  Description of Artificial Sequence:  Target Sequence/siNA sense region
uucaagcuuuucuuuuuuu

SEQ ID NO: 174 - RNA, 19 nt, Artificial Sequence
  Description of Artificial Sequence:  Target Sequence/siNA sense region
uguccacguaucuuugggu

SEQ ID NO: 175 - RNA, 19 nt, Artificial Sequence
  Description of Artificial Sequence:  Target Sequence/siNA sense region
ucuuugauaaagaaaagaa

SEQ ID NO: 176 - RNA, 19 nt, Artificial Sequence
  Description of Artificial Sequence:  Target Sequence/siNA sense region
aucccuguucauuguaagc

SEQ ID NO: 177 - RNA, 19 nt, Artificial Sequence
  Description of Artificial Sequence:  Target Sequence/siNA sense region
cacuuuuacggggcgggug

SEQ ID NO: 178 - RNA, 19 nt, Artificial Sequence
  Description of Artificial Sequence:  Target Sequence/siNA sense region
ggggaggggugcucugcug

SEQ ID NO: 179 - RNA, 19 nt, Artificial Sequence
  Description of Artificial Sequence:  Target Sequence/siNA sense region
ggucuucaauuaccaagaa

SEQ ID NO: 180 - RNA, 19 nt, Artificial Sequence
  Description of Artificial Sequence:  Target Sequence/siNA sense region
auucuccaaaacaauuuuc

SEQ ID NO: 181 - RNA, 19 nt, Artificial Sequence
  Description of Artificial Sequence:  Target Sequence/siNA sense region
cugcaggaugauuguacag

SEQ ID NO: 182 - RNA, 19 nt, Artificial Sequence
  Description of Artificial Sequence:  Target Sequence/siNA sense region
gaaucauugcuuaugacau

SEQ ID NO: 183 - RNA, 19 nt, Artificial Sequence
  Description of Artificial Sequence:  Target Sequence/siNA sense region
ugaucgcuuucuacacugu

SEQ ID NO: 184 - RNA, 19 nt, Artificial Sequence
  Description of Artificial Sequence:  Target Sequence/siNA sense region
uauuacauaaauaaauuaa

SEQ ID NO: 185 - RNA, 19 nt, Artificial Sequence
  Description of Artificial Sequence:  Target Sequence/siNA sense region
aauaaaauaaccccgggca

SEQ ID NO: 186 - RNA, 19 nt, Artificial Sequence
  Description of Artificial Sequence:  Target Sequence/siNA sense region
aagacuuuucuuugaagga

SEQ ID NO: 187 - RNA, 19 nt, Artificial Sequence
  Description of Artificial Sequence:  Target Sequence/siNA sense region
augacuacagacauuaaau

SEQ ID NO: 188 - RNA, 19 nt, Artificial Sequence
  Description of Artificial Sequence:  Target Sequence/siNA sense region
uaaucgaaguaauuuuggg

SEQ ID NO: 189 - RNA, 19 nt, Artificial Sequence
  Description of Artificial Sequence:  Target Sequence/siNA sense region
guggggagaagaggcagau

SEQ ID NO: 190 - RNA, 19 nt, Artificial Sequence
  Description of Artificial Sequence:  Target Sequence/siNA sense region
uucaauuuucuuuaaccag

SEQ ID NO: 191 - RNA, 19 nt, Artificial Sequence
  Description of Artificial Sequence:  Target Sequence/siNA sense region
gucugaaguuucauuuaug

SEQ ID NO: 192 - RNA, 19 nt, Artificial Sequence
  Description of Artificial Sequence:  Target Sequence/siNA sense region
gauacaaaagaagaugaaa

SEQ ID NO: 193 - RNA, 19 nt, Artificial Sequence
  Description of Artificial Sequence:  Target Sequence/siNA sense region
aauggaaguggcaauauaa

SEQ ID NO: 194 - RNA, 19 nt, Artificial Sequence
  Description of Artificial Sequence:  Target Sequence/siNA sense region
aggggaugaggaaggcaug

SEQ ID NO: 195 - RNA, 19 nt, Artificial Sequence
  Description of Artificial Sequence:  Target Sequence/siNA sense region
gccuggacaaacccuucuu

SEQ ID NO: 196 - RNA, 19 nt, Artificial Sequence
  Description of Artificial Sequence:  Target Sequence/siNA sense region
uuuaagaugugucuucaau

SEQ ID NO: 197 - RNA, 19 nt, Artificial Sequence
  Description of Artificial Sequence:  Target Sequence/siNA sense region
uuuguauaaaaugguguuu

SEQ ID NO: 198 - RNA, 19 nt, Artificial Sequence
  Description of Artificial Sequence:  Target Sequence/siNA sense region
uucauguaaauaaauacau

SEQ ID NO: 199 - RNA, 19 nt, Artificial Sequence
  Description of Artificial Sequence:  Target Sequence/siNA sense region
uaaauacauucuuggagga

SEQ ID NO: 200 - RNA, 19 nt, Artificial Sequence
  Description of Artificial Sequence:  siNA antisense region
ccuaccgcugccgaggaaa

SEQ ID NO: 201 - RNA, 19 nt, Artificial Sequence
  Description of Artificial Sequence:  siNA antisense region
cuccuccgcgugcucucgc

SEQ ID NO: 202 - RNA, 19 nt, Artificial Sequence
  Description of Artificial Sequence:  siNA antisense region
ccggggcccccgcgcacgc

SEQ ID NO: 203 - RNA, 19 nt, Artificial Sequence
  Description of Artificial Sequence:  siNA antisense region
cgccaccgccgccgucucc

SEQ ID NO: 204 - RNA, 19 nt, Artificial Sequence
  Description of Artificial Sequence:  siNA antisense region
uccuugcucugcccgcgcc

SEQ ID NO: 205 - RNA, 19 nt, Artificial Sequence
  Description of Artificial Sequence:  siNA antisense region
cgagugggauccgccgcgu

SEQ ID NO: 206 - RNA, 19 nt, Artificial Sequence
  Description of Artificial Sequence:  siNA antisense region
accgagugcgcugcugugc

SEQ ID NO: 207 - RNA, 19 nt, Artificial Sequence
  Description of Artificial Sequence:  siNA antisense region
cgcgacccugcgcggggca

SEQ ID NO: 208 - RNA, 19 nt, Artificial Sequence
  Description of Artificial Sequence:  siNA antisense region
ugccaaaccgggcagcauc

SEQ ID NO: 209 - RNA, 19 nt, Artificial Sequence
  Description of Artificial Sequence:  siNA antisense region
ggcggccagcaggagcagu

SEQ ID NO: 210 - RNA, 19 nt, Artificial Sequence
  Description of Artificial Sequence:  siNA antisense region
cagcgcccgagccguccag

SEQ ID NO: 211 - RNA, 19 nt, Artificial Sequence
  Description of Artificial Sequence:  siNA antisense region
accaucaguggguaccucc

SEQ ID NO: 212 - RNA, 19 nt, Artificial Sequence
  Description of Artificial Sequence:  siNA antisense region
agccagcaggccagcauua

SEQ ID NO: 213 - RNA, 19 nt, Artificial Sequence
  Description of Artificial Sequence:  siNA antisense region
cauggcaaucugggguuca

SEQ ID NO: 214 - RNA, 19 nt, Artificial Sequence
  Description of Artificial Sequence:  siNA antisense region
guucagucugccacagaac

SEQ ID NO: 215 - RNA, 19 nt, Artificial Sequence
  Description of Artificial Sequence:  siNA antisense region
cuggacauucaugugcaug

SEQ ID NO: 216 - RNA, 19 nt, Artificial Sequence
  Description of Artificial Sequence:  siNA antisense region
ugaaucccacuucccauuc

SEQ ID NO: 217 - RNA, 19 nt, Artificial Sequence
  Description of Artificial Sequence:  siNA antisense region
uuuggucccugauggaucu

SEQ ID NO: 218 - RNA, 19 nt, Artificial Sequence
  Description of Artificial Sequence:  siNA antisense region
cuugguaucaaugcagguu

SEQ ID NO: 219 - RNA, 19 nt, Artificial Sequence
  Description of Artificial Sequence:  siNA antisense region
auacugcaggaugccuucc

SEQ ID NO: 220 - RNA, 19 nt, Artificial Sequence
  Description of Artificial Sequence:  siNA antisense region
aggguagacuucuuggcaa

SEQ ID NO: 221 - RNA, 19 nt, Artificial Sequence
  Description of Artificial Sequence:  siNA antisense region
auuggugaucugcaguuca

SEQ ID NO: 222 - RNA, 19 nt, Artificial Sequence
  Description of Artificial Sequence:  siNA antisense region
uugguuggcuucuaccaca

SEQ ID NO: 223 - RNA, 19 nt, Artificial Sequence
  Description of Artificial Sequence:  siNA antisense region
guucuggauggucacuggu

SEQ ID NO: 224 - RNA, 19 nt, Artificial Sequence
  Description of Artificial Sequence:  siNA antisense region
gcggccccgcuugcaccag

SEQ ID NO: 225 - RNA, 19 nt, Artificial Sequence
  Description of Artificial Sequence:  siNA antisense region
augggucuugcacugcuug

SEQ ID NO: 226 - RNA, 19 nt, Artificial Sequence
  Description of Artificial Sequence:  siNA antisense region
gggaaucacaaagugggga

SEQ ID NO: 227 - RNA, 19 nt, Artificial Sequence
  Description of Artificial Sequence:  siNA antisense region
accaacuaagcagcgguag

SEQ ID NO: 228 - RNA, 19 nt, Artificial Sequence
  Description of Artificial Sequence:  siNA antisense region
ggcaucacuuacaaacuca

SEQ ID NO: 229 - RNA, 19 nt, Artificial Sequence
  Description of Artificial Sequence:  siNA antisense region
cuugucaggaacgagaagg

SEQ ID NO: 230 - RNA, 19 nt, Artificial Sequence
  Description of Artificial Sequence:  siNA antisense region
cugguguaagaauuugcac

SEQ ID NO: 231 - RNA, 19 nt, Artificial Sequence
  Description of Artificial Sequence:  siNA antisense region
gcaaacauccauccucucc

SEQ ID NO: 232 - RNA, 19 nt, Artificial Sequence
  Description of Artificial Sequence:  siNA antisense region
ccagugaagaugaguuucg

SEQ ID NO: 233 - RNA, 19 nt, Artificial Sequence
  Description of Artificial Sequence:  siNA antisense region
cucuuuggcgacggugugc

SEQ ID NO: 234 - RNA, 19 nt, Artificial Sequence
  Description of Artificial Sequence:  siNA antisense region
acucuucucacugcauguc

SEQ ID NO: 235 - RNA, 19 nt, Artificial Sequence
  Description of Artificial Sequence:  siNA antisense region
guagucaugcaaguuggua

SEQ ID NO: 236 - RNA, 19 nt, Artificial Sequence
  Description of Artificial Sequence:  siNA antisense region
gcagggcagcaacaugccg

SEQ ID NO: 237 - RNA, 19 nt, Artificial Sequence
  Description of Artificial Sequence:  siNA antisense region
ucggaacuugucaauuccg

SEQ ID NO: 238 - RNA, 19 nt, Artificial Sequence
  Description of Artificial Sequence:  siNA antisense region
acacacaaacucuaccccu

SEQ ID NO: 239 - RNA, 19 nt, Artificial Sequence
  Description of Artificial Sequence:  siNA antisense region
uucuucagccagugggcaa

SEQ ID NO: 240 - RNA, 19 nt, Artificial Sequence
  Description of Artificial Sequence:  siNA antisense region
agaauccacauugucacuu

SEQ ID NO: 241 - RNA, 19 nt, Artificial Sequence
  Description of Artificial Sequence:  siNA antisense region
auccuccuccgcaucagca

SEQ ID NO: 242 - RNA, 19 nt, Artificial Sequence
  Description of Artificial Sequence:  siNA antisense region
ccaccagacauccgaguca

SEQ ID NO: 243 - RNA, 19 nt, Artificial Sequence
  Description of Artificial Sequence:  siNA antisense region
gucugugucugcuccgccc

SEQ ID NO: 244 - RNA, 19 nt, Artificial Sequence
  Description of Artificial Sequence:  siNA antisense region
uucacucccaucugcauag

SEQ ID NO: 245 - RNA, 19 nt, Artificial Sequence
  Description of Artificial Sequence:  siNA antisense region
uacuucuacuacuuugucu

SEQ ID NO: 246 - RNA, 19 nt, Artificial Sequence
  Description of Artificial Sequence:  siNA antisense region
cacuucuuccuccucugcu

SEQ ID NO: 247 - RNA, 19 nt, Artificial Sequence
  Description of Artificial Sequence:  siNA antisense region
uucuucuuccaccucagcc

SEQ ID NO: 248 - RNA, 19 nt, Artificial Sequence
  Description of Artificial Sequence:  siNA antisense region
cucgucaucaucggcuucu

SEQ ID NO: 249 - RNA, 19 nt, Artificial Sequence
  Description of Artificial Sequence:  siNA antisense region
aucaccauccucaucgucc

SEQ ID NO: 250 - RNA, 19 nt, Artificial Sequence
  Description of Artificial Sequence:  siNA antisense region
agccucuuccucuaccuca

SEQ ID NO: 251 - RNA, 19 nt, Artificial Sequence
  Description of Artificial Sequence:  siNA antisense region
uucuucguaggguuccuca

SEQ ID NO: 252 - RNA, 19 nt, Artificial Sequence
  Description of Artificial Sequence:  siNA antisense region
ggugguucucucuguggcu

SEQ ID NO: 253 - RNA, 19 nt, Artificial Sequence
  Description of Artificial Sequence:  siNA antisense region
gguggugguggcaaugcug

SEQ ID NO: 254 - RNA, 19 nt, Artificial Sequence
  Description of Artificial Sequence:  siNA antisense region
agacucuguggugguggug

SEQ ID NO: 255 - RNA, 19 nt, Artificial Sequence
  Description of Artificial Sequence:  siNA antisense region
ucgaaccaccucuuccaca

SEQ ID NO: 256 - RNA, 19 nt, Artificial Sequence
  Description of Artificial Sequence:  siNA antisense region
uuguucagagcacaccucu

SEQ ID NO: 257 - RNA, 19 nt, Artificial Sequence
  Description of Artificial Sequence:  siNA antisense region
gcacggccccgucucggcu

SEQ ID NO: 258 - RNA, 19 nt, Artificial Sequence
  Description of Artificial Sequence:  siNA antisense region
gcgggagaucauugcucgg

SEQ ID NO: 259 - RNA, 19 nt, Artificial Sequence
  Description of Artificial Sequence:  siNA antisense region
agucacaucaaaguaccag

SEQ ID NO: 260 - RNA, 19 nt, Artificial Sequence
  Description of Artificial Sequence:  siNA antisense region
uggggcacacuucccuuca

SEQ ID NO: 261 - RNA, 19 nt, Artificial Sequence
  Description of Artificial Sequence:  siNA antisense region
acauccgccguaaaagaau

SEQ ID NO: 262 - RNA, 19 nt, Artificial Sequence
  Description of Artificial Sequence:  siNA antisense region
guuguuccgguugccgcca

SEQ ID NO: 263 - RNA, 19 nt, Artificial Sequence
  Description of Artificial Sequence:  siNA antisense region
guacucuucugugucaaag

SEQ ID NO: 264 - RNA, 19 nt, Artificial Sequence
  Description of Artificial Sequence:  siNA antisense region
gccacacacggccaugcag

SEQ ID NO: 265 - RNA, 19 nt, Artificial Sequence
  Description of Artificial Sequence:  siNA antisense region
acuuugggacauggcgcug

SEQ ID NO: 266 - RNA, 19 nt, Artificial Sequence
  Description of Artificial Sequence:  siNA antisense region
cuggguagucuugaguaaa

SEQ ID NO: 267 - RNA, 19 nt, Artificial Sequence
  Description of Artificial Sequence:  siNA antisense region
aucucgggcaagagguucc

SEQ ID NO: 268 - RNA, 19 nt, Artificial Sequence
  Description of Artificial Sequence:  siNA antisense region
uguaggaaguuuaacagga

SEQ ID NO: 269 - RNA, 19 nt, Artificial Sequence
  Description of Artificial Sequence:  siNA antisense region
agggguacuggcugcuguu

SEQ ID NO: 270 - RNA, 19 nt, Artificial Sequence
  Description of Artificial Sequence:  siNA antisense region
auacuugucaacggcauca

SEQ ID NO: 271 - RNA, 19 nt, Artificial Sequence
  Description of Artificial Sequence:  siNA antisense region
auccccaggugucucgaga

SEQ ID NO: 272 - RNA, 19 nt, Artificial Sequence
  Description of Artificial Sequence:  siNA antisense region
augggcauguucauucuca

SEQ ID NO: 273 - RNA, 19 nt, Artificial Sequence
  Description of Artificial Sequence:  siNA antisense region
cucuuuggcuuucuggaaa

SEQ ID NO: 274 - RNA, 19 nt, Artificial Sequence
  Description of Artificial Sequence:  siNA antisense region
gugcuuggccucaagccuc

SEQ ID NO: 275 - RNA, 19 nt, Artificial Sequence
  Description of Artificial Sequence:  siNA antisense region
cugggacauucucucucgg

SEQ ID NO: 276 - RNA, 19 nt, Artificial Sequence
  Description of Artificial Sequence:  siNA antisense region
uucccauucucucaugacc

SEQ ID NO: 277 - RNA, 19 nt, Artificial Sequence
  Description of Artificial Sequence:  siNA antisense region
ugcuugacguucugccucu

SEQ ID NO: 278 - RNA, 19 nt, Artificial Sequence
  Description of Artificial Sequence:  siNA antisense region
agcuuuaggcaaguucuuu

SEQ ID NO: 279 - RNA, 19 nt, Artificial Sequence
  Description of Artificial Sequence:  siNA antisense region
gauaacugccuucuuauca

SEQ ID NO: 280 - RNA, 19 nt, Artificial Sequence
  Description of Artificial Sequence:  siNA antisense region
uuucuccuggaaaugcugg

SEQ ID NO: 281 - RNA, 19 nt, Artificial Sequence
  Description of Artificial Sequence:  siNA antisense region
cuguuccaaagauuccacu

SEQ ID NO: 282 - RNA, 19 nt, Artificial Sequence
  Description of Artificial Sequence:  siNA antisense region
ucucucguuggcugcuucc

SEQ ID NO: 283 - RNA, 19 nt, Artificial Sequence
  Description of Artificial Sequence:  siNA antisense region
ugucuccaccagcugcugu

SEQ ID NO: 284 - RNA, 19 nt, Artificial Sequence
  Description of Artificial Sequence:  siNA antisense region
uuccacucuggccaugugu

SEQ ID NO: 285 - RNA, 19 nt, Artificial Sequence
  Description of Artificial Sequence:  siNA antisense region
gcggucauugagcauggcu

SEQ ID NO: 286 - RNA, 19 nt, Artificial Sequence
  Description of Artificial Sequence:  siNA antisense region
cuccagggccaggcggcgg

SEQ ID NO: 287 - RNA, 19 nt, Artificial Sequence
  Description of Artificial Sequence:  siNA antisense region
cagagcggugauguaguuc

SEQ ID NO: 288 - RNA, 19 nt, Artificial Sequence
  Description of Artificial Sequence:  siNA antisense region
ccgaggaggaacagccugc

SEQ ID NO: 289 - RNA, 19 nt, Artificial Sequence
  Description of Artificial Sequence:  siNA antisense region
auugaacacgugacgaggc

SEQ ID NO: 290 - RNA, 19 nt, Artificial Sequence
  Description of Artificial Sequence:  siNA antisense region
gacauacuucuuuagcaua

SEQ ID NO: 291 - RNA, 19 nt, Artificial Sequence
  Description of Artificial Sequence:  siNA antisense region
guccuucuguucugcgcgg

SEQ ID NO: 292 - RNA, 19 nt, Artificial Sequence
  Description of Artificial Sequence:  siNA antisense region
cuuuagggugugcugucug

SEQ ID NO: 293 - RNA, 19 nt, Artificial Sequence
  Description of Artificial Sequence:  siNA antisense region
gcgcacaugcucgaaaugc

SEQ ID NO: 294 - RNA, 19 nt, Artificial Sequence
  Description of Artificial Sequence:  siNA antisense region
uuucuugggauccaccaug

SEQ ID NO: 295 - RNA, 19 nt, Artificial Sequence
  Description of Artificial Sequence:  siNA antisense region
ggaccggaucugagcggcu

SEQ ID NO: 296 - RNA, 19 nt, Artificial Sequence
  Description of Artificial Sequence:  siNA antisense region
gaggugugucauaaccugg

SEQ ID NO: 297 - RNA, 19 nt, Artificial Sequence
  Description of Artificial Sequence:  siNA antisense region
gcgcucauaaaucacacgg

SEQ ID NO: 298 - RNA, 19 nt, Artificial Sequence
  Description of Artificial Sequence:  siNA antisense region
ggagagagacugauucaug

SEQ ID NO: 299 - RNA, 19 nt, Artificial Sequence
  Description of Artificial Sequence:  siNA antisense region
aggcacguuguagagcagg

SEQ ID NO: 300 - RNA, 19 nt, Artificial Sequence
  Description of Artificial Sequence:  siNA antisense region
aaucuccucggccacugca

SEQ ID NO: 301 - RNA, 19 nt, Artificial Sequence
  Description of Artificial Sequence:  siNA antisense region
cucaucaacuucauccuga

SEQ ID NO: 302 - RNA, 19 nt, Artificial Sequence
  Description of Artificial Sequence:  siNA antisense region
uugcucuuucugaagcagc

SEQ ID NO: 303 - RNA, 19 nt, Artificial Sequence
  Description of Artificial Sequence:  siNA antisense region
gacgucaucugaauaguuu

SEQ ID NO: 304 - RNA, 19 nt, Artificial Sequence
  Description of Artificial Sequence:  siNA antisense region
acuaaucauguuggccaag

SEQ ID NO: 305 - RNA, 19 nt, Artificial Sequence
  Description of Artificial Sequence:  siNA antisense region
guaacugauccuugguuca

SEQ ID NO: 306 - RNA, 19 nt, Artificial Sequence
  Description of Artificial Sequence:  siNA antisense region
caugagagcaucguuuccg

SEQ ID NO: 307 - RNA, 19 nt, Artificial Sequence
  Description of Artificial Sequence:  siNA antisense region
cguuucggucaaagauggc

SEQ ID NO: 308 - RNA, 19 nt, Artificial Sequence
  Description of Artificial Sequence:  siNA antisense region
gagcuccacggugguuuuc

SEQ ID NO: 309 - RNA, 19 nt, Artificial Sequence
  Description of Artificial Sequence:  siNA antisense region
cucuccauucacgggaagg

SEQ ID NO: 310 - RNA, 19 nt, Artificial Sequence
  Description of Artificial Sequence:  siNA antisense region
gagaucguccaggcugaac

SEQ ID NO: 311 - RNA, 19 nt, Artificial Sequence
  Description of Artificial Sequence:  siNA antisense region
aaaagaaugccacggcugg

SEQ ID NO: 312 - RNA, 19 nt, Artificial Sequence
  Description of Artificial Sequence:  siNA antisense region
uggcacagagucagcccca

SEQ ID NO: 313 - RNA, 19 nt, Artificial Sequence
  Description of Artificial Sequence:  siNA antisense region
uucguuuucuguguuggcu

SEQ ID NO: 314 - RNA, 19 nt, Artificial Sequence
  Description of Artificial Sequence:  siNA antisense region
ggcaucaacaggcucaacu

SEQ ID NO: 315 - RNA, 19 nt, Artificial Sequence
  Description of Artificial Sequence:  siNA antisense region
ucggucggcagcagggcgg

SEQ ID NO: 316 - RNA, 19 nt, Artificial Sequence
  Description of Artificial Sequence:  siNA antisense region
uggucgaguggucaguccu

SEQ ID NO: 317 - RNA, 19 nt, Artificial Sequence
  Description of Artificial Sequence:  siNA antisense region
auuugucaacccagaaccu

SEQ ID NO: 318 - RNA, 19 nt, Artificial Sequence
  Description of Artificial Sequence:  siNA antisense region
gaucuccuccgucuugaua

SEQ ID NO: 319 - RNA, 19 nt, Artificial Sequence
  Description of Artificial Sequence:  siNA antisense region
auccaucuucacuucagag

SEQ ID NO: 320 - RNA, 19 nt, Artificial Sequence
  Description of Artificial Sequence:  siNA antisense region
gucaugucggaauucugca

SEQ ID NO: 321 - RNA, 19 nt, Artificial Sequence
  Description of Artificial Sequence:  siNA antisense region
augaacuucauauccugag

SEQ ID NO: 322 - RNA, 19 nt, Artificial Sequence
  Description of Artificial Sequence:  siNA antisense region
gaacaccaauuuuugauga

SEQ ID NO: 323 - RNA, 19 nt, Artificial Sequence
  Description of Artificial Sequence:  siNA antisense region
acccacaucuucugcaaag

SEQ ID NO: 324 - RNA, 19 nt, Artificial Sequence
  Description of Artificial Sequence:  siNA antisense region
gauugcaccuuuguuugaa

SEQ ID NO: 325 - RNA, 19 nt, Artificial Sequence
  Description of Artificial Sequence:  siNA antisense region
gcccaccaugaguccaaug

SEQ ID NO: 326 - RNA, 19 nt, Artificial Sequence
  Description of Artificial Sequence:  siNA antisense region
ugucgcuaugacaacaccg

SEQ ID NO: 327 - RNA, 19 nt, Artificial Sequence
  Description of Artificial Sequence:  siNA antisense region
caaggugaugacgaucacu

SEQ ID NO: 328 - RNA, 19 nt, Artificial Sequence
  Description of Artificial Sequence:  siNA antisense region
uuucuucuucagcaucacc

SEQ ID NO: 329 - RNA, 19 nt, Artificial Sequence
  Description of Artificial Sequence:  siNA antisense region
augaauggauguguacugu

SEQ ID NO: 330 - RNA, 19 nt, Artificial Sequence
  Description of Artificial Sequence:  siNA antisense region
aaccuccaccacaccauga

SEQ ID NO: 331 - RNA, 19 nt, Artificial Sequence
  Description of Artificial Sequence:  siNA antisense region
uggggugacagcggcguca

SEQ ID NO: 332 - RNA, 19 nt, Artificial Sequence
  Description of Artificial Sequence:  siNA antisense region
ggacagguggcgcuccucu

SEQ ID NO: 333 - RNA, 19 nt, Artificial Sequence
  Description of Artificial Sequence:  siNA antisense region
gccguucugcugcaucuug

SEQ ID NO: 334 - RNA, 19 nt, Artificial Sequence
  Description of Artificial Sequence:  siNA antisense region
guagguuggauuuucguag

SEQ ID NO: 335 - RNA, 19 nt, Artificial Sequence
  Description of Artificial Sequence:  siNA antisense region
caucugcucaaagaacuug

SEQ ID NO: 336 - RNA, 19 nt, Artificial Sequence
  Description of Artificial Sequence:  siNA antisense region
ggcgggggucuaguucugc

SEQ ID NO: 337 - RNA, 19 nt, Artificial Sequence
  Description of Artificial Sequence:  siNA antisense region
aacuucagaggcugcugug

SEQ ID NO: 338 - RNA, 19 nt, Artificial Sequence
  Description of Artificial Sequence:  siNA antisense region
gcaaugguuuugcugucca

SEQ ID NO: 339 - RNA, 19 nt, Artificial Sequence
  Description of Artificial Sequence:  siNA antisense region
acaccgauggguagugaag

SEQ ID NO: 340 - RNA, 19 nt, Artificial Sequence
  Description of Artificial Sequence:  siNA antisense region
acauuauucuauaaaugga

SEQ ID NO: 341 - RNA, 19 nt, Artificial Sequence
  Description of Artificial Sequence:  siNA antisense region
acggguuuguuucuuccca

SEQ ID NO: 342 - RNA, 19 nt, Artificial Sequence
  Description of Artificial Sequence:  siNA antisense region
uaaugaguaaaucauaaaa

SEQ ID NO: 343 - RNA, 19 nt, Artificial Sequence
  Description of Artificial Sequence:  siNA antisense region
acagcugucaaaaggcgau

SEQ ID NO: 344 - RNA, 19 nt, Artificial Sequence
  Description of Artificial Sequence:  siNA antisense region
aucuacuuguguuacagca

SEQ ID NO: 345 - RNA, 19 nt, Artificial Sequence
  Description of Artificial Sequence:  siNA antisense region
auuaauucaaguucaggca

SEQ ID NO: 346 - RNA, 19 nt, Artificial Sequence
  Description of Artificial Sequence:  siNA antisense region
uacauuacugaugugugga

SEQ ID NO: 347 - RNA, 19 nt, Artificial Sequence
  Description of Artificial Sequence:  siNA antisense region
auguaaagagagauagaau

SEQ ID NO: 348 - RNA, 19 nt, Artificial Sequence
  Description of Artificial Sequence:  siNA antisense region
uguaguauagagaccaaaa

SEQ ID NO: 349 - RNA, 19 nt, Artificial Sequence
  Description of Artificial Sequence:  siNA antisense region
cacaaaacccauuaauaau

SEQ ID NO: 350 - RNA, 19 nt, Artificial Sequence
  Description of Artificial Sequence:  siNA antisense region
gcuaaauucuuuacaguac

SEQ ID NO: 351 - RNA, 19 nt, Artificial Sequence
  Description of Artificial Sequence:  siNA antisense region
augcacuaguuugauacag

SEQ ID NO: 352 - RNA, 19 nt, Artificial Sequence
  Description of Artificial Sequence:  siNA antisense region
ucaggagagaaucuauuca

SEQ ID NO: 353 - RNA, 19 nt, Artificial Sequence
  Description of Artificial Sequence:  siNA antisense region
gggcuaugugauaaauaau

SEQ ID NO: 354 - RNA, 19 nt, Artificial Sequence
  Description of Artificial Sequence:  siNA antisense region
aauauacaacuggcuaagg

SEQ ID NO: 355 - RNA, 19 nt, Artificial Sequence
  Description of Artificial Sequence:  siNA antisense region
gucacaaaccacaagaaua

SEQ ID NO: 356 - RNA, 19 nt, Artificial Sequence
  Description of Artificial Sequence:  siNA antisense region
aaaguaggacuuaauuggg

SEQ ID NO: 357 - RNA, 19 nt, Artificial Sequence
  Description of Artificial Sequence:  siNA antisense region
gauucuuaaagcauaugua

SEQ ID NO: 358 - RNA, 19 nt, Artificial Sequence
  Description of Artificial Sequence:  siNA antisense region
caugaagcaucccccaucg

SEQ ID NO: 359 - RNA, 19 nt, Artificial Sequence
  Description of Artificial Sequence:  siNA antisense region
gcugaacucccacguucac

SEQ ID NO: 360 - RNA, 19 nt, Artificial Sequence
  Description of Artificial Sequence:  siNA antisense region
acuuaggcaagagaagcag

SEQ ID NO: 361 - RNA, 19 nt, Artificial Sequence
  Description of Artificial Sequence:  siNA antisense region
agugaucaggaaaggaaua

SEQ ID NO: 362 - RNA, 19 nt, Artificial Sequence
  Description of Artificial Sequence:  siNA antisense region
uuuaacuuuaaaaugcaua

SEQ ID NO: 363 - RNA, 19 nt, Artificial Sequence
  Description of Artificial Sequence:  siNA antisense region
cugaaauacuuaaaaaugu

SEQ ID NO: 364 - RNA, 19 nt, Artificial Sequence
  Description of Artificial Sequence:  siNA antisense region
aaaaucucucuaaagcauc

SEQ ID NO: 365 - RNA, 19 nt, Artificial Sequence
  Description of Artificial Sequence:  siNA antisense region
aaaugcagucauggaaaaa

SEQ ID NO: 366 - RNA, 19 nt, Artificial Sequence
  Description of Artificial Sequence:  siNA antisense region
gcagcaaucuguacaguaa

SEQ ID NO: 367 - RNA, 19 nt, Artificial Sequence
  Description of Artificial Sequence:  siNA antisense region
aucacaaauauagcagaag

SEQ ID NO: 368 - RNA, 19 nt, Artificial Sequence
  Description of Artificial Sequence:  siNA antisense region
uauccucuuaauuccuaua

SEQ ID NO: 369 - RNA, 19 nt, Artificial Sequence
  Description of Artificial Sequence:  siNA antisense region
cgaagaaacaaacgugugu

SEQ ID NO: 370 - RNA, 19 nt, Artificial Sequence
  Description of Artificial Sequence:  siNA antisense region
gugcacauaaaacaggcac

SEQ ID NO: 371 - RNA, 19 nt, Artificial Sequence
  Description of Artificial Sequence:  siNA antisense region
agucucaaugccuaaugug

SEQ ID NO: 372 - RNA, 19 nt, Artificial Sequence
  Description of Artificial Sequence:  siNA antisense region
aaaaaaagaaaagcuugaa

SEQ ID NO: 373 - RNA, 19 nt, Artificial Sequence
  Description of Artificial Sequence:  siNA antisense region
acccaaagauacguggaca

SEQ ID NO: 374 - RNA, 19 nt, Artificial Sequence
  Description of Artificial Sequence:  siNA antisense region
uucuuuucuuuaucaaaga

SEQ ID NO: 375 - RNA, 19 nt, Artificial Sequence
  Description of Artificial Sequence:  siNA antisense region
gcuuacaaugaacagggau

SEQ ID NO: 376 - RNA, 19 nt, Artificial Sequence
  Description of Artificial Sequence:  siNA antisense region
cacccgccccguaaaagug

SEQ ID NO: 377 - RNA, 19 nt, Artificial Sequence
  Description of Artificial Sequence:  siNA antisense region
cagcagagcaccccucccc

SEQ ID NO: 378 - RNA, 19 nt, Artificial Sequence
  Description of Artificial Sequence:  siNA antisense region
uucuugguaauugaagacc

SEQ ID NO: 379 - RNA, 19 nt, Artificial Sequence
  Description of Artificial Sequence:  siNA antisense region
gaaaauuguuuuggagaau

SEQ ID NO: 380 - RNA, 19 nt, Artificial Sequence
  Description of Artificial Sequence:  siNA antisense region
cuguacaaucauccugcag

SEQ ID NO: 381 - RNA, 19 nt, Artificial Sequence
  Description of Artificial Sequence:  siNA antisense region
augucauaagcaaugauuc

SEQ ID NO: 382 - RNA, 19 nt, Artificial Sequence
  Description of Artificial Sequence:  siNA antisense region
acaguguagaaagcgauca

SEQ ID NO: 383 - RNA, 19 nt, Artificial Sequence
  Description of Artificial Sequence:  siNA antisense region
uuaauuuauuuauguaaua

SEQ ID NO: 384 - RNA, 19 nt, Artificial Sequence
  Description of Artificial Sequence:  siNA antisense region
ugcccgggguuauuuuauu

SEQ ID NO: 385 - RNA, 19 nt, Artificial Sequence
  Description of Artificial Sequence:  siNA antisense region
uccuucaaagaaaagucuu

SEQ ID NO: 386 - RNA, 19 nt, Artificial Sequence
  Description of Artificial Sequence:  siNA antisense region
auuuaaugucuguagucau

SEQ ID NO: 387 - RNA, 19 nt, Artificial Sequence
  Description of Artificial Sequence:  siNA antisense region
cccaaaauuacuucgauua

SEQ ID NO: 388 - RNA, 19 nt, Artificial Sequence
  Description of Artificial Sequence:  siNA antisense region
aucugccucuucuccccac

SEQ ID NO: 389 - RNA, 19 nt, Artificial Sequence
  Description of Artificial Sequence:  siNA antisense region
cugguuaaagaaaauugaa

SEQ ID NO: 390 - RNA, 19 nt, Artificial Sequence
  Description of Artificial Sequence:  siNA antisense region
cauaaaugaaacuucagac

SEQ ID NO: 391 - RNA, 19 nt, Artificial Sequence
  Description of Artificial Sequence:  siNA antisense region
uuucaucuucuuuuguauc

SEQ ID NO: 392 - RNA, 19 nt, Artificial Sequence
  Description of Artificial Sequence:  siNA antisense region
uuauauugccacuuccauu

SEQ ID NO: 393 - RNA, 19 nt, Artificial Sequence
  Description of Artificial Sequence:  siNA antisense region
caugccuuccucauccccu

SEQ ID NO: 394 - RNA, 19 nt, Artificial Sequence
  Description of Artificial Sequence:  siNA antisense region
aagaaggguuuguccaggc

SEQ ID NO: 395 - RNA, 19 nt, Artificial Sequence
  Description of Artificial Sequence:  siNA antisense region
auugaagacacaucuuaaa

SEQ ID NO: 396 - RNA, 19 nt, Artificial Sequence
  Description of Artificial Sequence:  siNA antisense region
aaacaccauuuuauacaaa

SEQ ID NO: 397 - RNA, 19 nt, Artificial Sequence
  Description of Artificial Sequence:  siNA antisense region
auguauuuauuuacaugaa

SEQ ID NO: 398 - RNA, 19 nt, Artificial Sequence
  Description of Artificial Sequence:  siNA antisense region
uccuccaagaauguauuua

SEQ ID NO: 399 - RNA, 19 nt, Artificial Sequence
  Description of Artificial Sequence:  Target Sequence/siNA sense region
cgcacucguccccagcccg

SEQ ID NO: 400 - RNA, 19 nt, Artificial Sequence
  Description of Artificial Sequence:  Target Sequence/siNA sense region
gcccgggagcugcgagccg

SEQ ID NO: 401 - RNA, 19 nt, Artificial Sequence
  Description of Artificial Sequence:  Target Sequence/siNA sense region
gcgagcuggauuauggugg

SEQ ID NO: 402 - RNA, 19 nt, Artificial Sequence
  Description of Artificial Sequence:  Target Sequence/siNA sense region
gccugagcagccaacgcag

SEQ ID NO: 403 - RNA, 19 nt, Artificial Sequence
  Description of Artificial Sequence:  Target Sequence/siNA sense region
gccgcaggagcccggagcc

SEQ ID NO: 404 - RNA, 19 nt, Artificial Sequence
  Description of Artificial Sequence:  Target Sequence/siNA sense region
ccuugccccugcccgcgcc

SEQ ID NO: 405 - RNA, 19 nt, Artificial Sequence
  Description of Artificial Sequence:  Target Sequence/siNA sense region
cgccgcccgccggggggac

SEQ ID NO: 406 - RNA, 19 nt, Artificial Sequence
  Description of Artificial Sequence:  Target Sequence/siNA sense region
ccagggaagccgccaccgg

SEQ ID NO: 407 - RNA, 19 nt, Artificial Sequence
  Description of Artificial Sequence:  Target Sequence/siNA sense region
gcccgccaugcccgccccu

SEQ ID NO: 408 - RNA, 19 nt, Artificial Sequence
  Description of Artificial Sequence:  Target Sequence/siNA sense region
ucccagccccgccgggagc

SEQ ID NO: 409 - RNA, 19 nt, Artificial Sequence
  Description of Artificial Sequence:  Target Sequence/siNA sense region
cccgcgcccgcugcccagg

SEQ ID NO: 410 - RNA, 19 nt, Artificial Sequence
  Description of Artificial Sequence:  Target Sequence/siNA sense region
gcuggccgccgccgugccg

SEQ ID NO: 411 - RNA, 19 nt, Artificial Sequence
  Description of Artificial Sequence:  Target Sequence/siNA sense region
gauguagcgggcuccggau

SEQ ID NO: 412 - RNA, 19 nt, Artificial Sequence
  Description of Artificial Sequence:  Target Sequence/siNA sense region
ucccagccucuccccugcu

SEQ ID NO: 413 - RNA, 19 nt, Artificial Sequence
  Description of Artificial Sequence:  Target Sequence/siNA sense region
ucccgugcucugcggaucu

SEQ ID NO: 414 - RNA, 19 nt, Artificial Sequence
  Description of Artificial Sequence:  Target Sequence/siNA sense region
uccccugaccgcucuccac

SEQ ID NO: 415 - RNA, 19 nt, Artificial Sequence
  Description of Artificial Sequence:  Target Sequence/siNA sense region
cagcccggacccgggggcu

SEQ ID NO: 416 - RNA, 19 nt, Artificial Sequence
  Description of Artificial Sequence:  Target Sequence/siNA sense region
uggcccagggcccugcagg

SEQ ID NO: 417 - RNA, 19 nt, Artificial Sequence
  Description of Artificial Sequence:  Target Sequence/siNA sense region
gcccuggcguccugaugcc

SEQ ID NO: 418 - RNA, 19 nt, Artificial Sequence
  Description of Artificial Sequence:  Target Sequence/siNA sense region
ccccaagcucccucuccug

SEQ ID NO: 419 - RNA, 19 nt, Artificial Sequence
  Description of Artificial Sequence:  Target Sequence/siNA sense region
gagaagccaccagcaccac

SEQ ID NO: 420 - RNA, 19 nt, Artificial Sequence
  Description of Artificial Sequence:  Target Sequence/siNA sense region
cccagacuugggggcaggc

SEQ ID NO: 421 - RNA, 19 nt, Artificial Sequence
  Description of Artificial Sequence:  Target Sequence/siNA sense region
cgccagggacggacguggg

SEQ ID NO: 422 - RNA, 19 nt, Artificial Sequence
  Description of Artificial Sequence:  Target Sequence/siNA sense region
gccagugcgagcccagagg

SEQ ID NO: 423 - RNA, 19 nt, Artificial Sequence
  Description of Artificial Sequence:  Target Sequence/siNA sense region
ggcccgaaggccggggccc

SEQ ID NO: 424 - RNA, 19 nt, Artificial Sequence
  Description of Artificial Sequence:  Target Sequence/siNA sense region
caccauggcccaagcccug

SEQ ID NO: 425 - RNA, 19 nt, Artificial Sequence
  Description of Artificial Sequence:  Target Sequence/siNA sense region
gcccuggcuccugcugugg

SEQ ID NO: 426 - RNA, 19 nt, Artificial Sequence
  Description of Artificial Sequence:  Target Sequence/siNA sense region
gaugggcgcgggagugcug

SEQ ID NO: 427 - RNA, 19 nt, Artificial Sequence
  Description of Artificial Sequence:  Target Sequence/siNA sense region
gccugcccacggcacccag

SEQ ID NO: 428 - RNA, 19 nt, Artificial Sequence
  Description of Artificial Sequence:  Target Sequence/siNA sense region
gcacggcauccggcugccc

SEQ ID NO: 429 - RNA, 19 nt, Artificial Sequence
  Description of Artificial Sequence:  Target Sequence/siNA sense region
ccugcgcagcggccugggg

SEQ ID NO: 430 - RNA, 19 nt, Artificial Sequence
  Description of Artificial Sequence:  Target Sequence/siNA sense region
gggcgccccccuggggcug

SEQ ID NO: 431 - RNA, 19 nt, Artificial Sequence
  Description of Artificial Sequence:  Target Sequence/siNA sense region
gcggcugccccgggagacc

SEQ ID NO: 432 - RNA, 19 nt, Artificial Sequence
  Description of Artificial Sequence:  Target Sequence/siNA sense region
cgacgaagagcccgaggag

SEQ ID NO: 433 - RNA, 19 nt, Artificial Sequence
  Description of Artificial Sequence:  Target Sequence/siNA sense region
gcccggccggaggggcagc

SEQ ID NO: 434 - RNA, 19 nt, Artificial Sequence
  Description of Artificial Sequence:  Target Sequence/siNA sense region
cuuuguggagaugguggac

SEQ ID NO: 435 - RNA, 19 nt, Artificial Sequence
  Description of Artificial Sequence:  Target Sequence/siNA sense region
caaccugaggggcaagucg

SEQ ID NO: 436 - RNA, 19 nt, Artificial Sequence
  Description of Artificial Sequence:  Target Sequence/siNA sense region
ggggcagggcuacuacgug

SEQ ID NO: 437 - RNA, 19 nt, Artificial Sequence
  Description of Artificial Sequence:  Target Sequence/siNA sense region
ggagaugaccgugggcagc

SEQ ID NO: 438 - RNA, 19 nt, Artificial Sequence
  Description of Artificial Sequence:  Target Sequence/siNA sense region
ccccccgcagacgcucaac

SEQ ID NO: 439 - RNA, 19 nt, Artificial Sequence
  Description of Artificial Sequence:  Target Sequence/siNA sense region
cauccugguggauacaggc

SEQ ID NO: 440 - RNA, 19 nt, Artificial Sequence
  Description of Artificial Sequence:  Target Sequence/siNA sense region
cagcaguaacuuugcagug

SEQ ID NO: 441 - RNA, 19 nt, Artificial Sequence
  Description of Artificial Sequence:  Target Sequence/siNA sense region
gggugcugccccccacccc

SEQ ID NO: 442 - RNA, 19 nt, Artificial Sequence
  Description of Artificial Sequence:  Target Sequence/siNA sense region
cuuccugcaucgcuacuac

SEQ ID NO: 443 - RNA, 19 nt, Artificial Sequence
  Description of Artificial Sequence:  Target Sequence/siNA sense region
ccagaggcagcuguccagc

SEQ ID NO: 444 - RNA, 19 nt, Artificial Sequence
  Description of Artificial Sequence:  Target Sequence/siNA sense region
cacauaccgggaccuccgg

SEQ ID NO: 445 - RNA, 19 nt, Artificial Sequence
  Description of Artificial Sequence:  Target Sequence/siNA sense region
gaaggguguguaugugccc

SEQ ID NO: 446 - RNA, 19 nt, Artificial Sequence
  Description of Artificial Sequence:  Target Sequence/siNA sense region
cuacacccagggcaagugg

SEQ ID NO: 447 - RNA, 19 nt, Artificial Sequence
  Description of Artificial Sequence:  Target Sequence/siNA sense region
ggaaggggagcugggcacc

SEQ ID NO: 448 - RNA, 19 nt, Artificial Sequence
  Description of Artificial Sequence:  Target Sequence/siNA sense region
cgaccugguaagcaucccc

SEQ ID NO: 449 - RNA, 19 nt, Artificial Sequence
  Description of Artificial Sequence:  Target Sequence/siNA sense region
ccauggccccaacgucacu

SEQ ID NO: 450 - RNA, 19 nt, Artificial Sequence
  Description of Artificial Sequence:  Target Sequence/siNA sense region
ugugcgugccaacauugcu

SEQ ID NO: 451 - RNA, 19 nt, Artificial Sequence
  Description of Artificial Sequence:  Target Sequence/siNA sense region
ugccaucacugaaucagac

SEQ ID NO: 452 - RNA, 19 nt, Artificial Sequence
  Description of Artificial Sequence:  Target Sequence/siNA sense region
caaguucuucaucaacggc

SEQ ID NO: 453 - RNA, 19 nt, Artificial Sequence
  Description of Artificial Sequence:  Target Sequence/siNA sense region
cuccaacugggaaggcauc

SEQ ID NO: 454 - RNA, 19 nt, Artificial Sequence
  Description of Artificial Sequence:  Target Sequence/siNA sense region
ccuggggcuggccuaugcu

SEQ ID NO: 455 - RNA, 19 nt, Artificial Sequence
  Description of Artificial Sequence:  Target Sequence/siNA sense region
ugagauugccaggccugac

SEQ ID NO: 456 - RNA, 19 nt, Artificial Sequence
  Description of Artificial Sequence:  Target Sequence/siNA sense region
cgacucccuggagccuuuc

SEQ ID NO: 457 - RNA, 19 nt, Artificial Sequence
  Description of Artificial Sequence:  Target Sequence/siNA sense region
cuuugacucucugguaaag

SEQ ID NO: 458 - RNA, 19 nt, Artificial Sequence
  Description of Artificial Sequence:  Target Sequence/siNA sense region
gcagacccacguucccaac

SEQ ID NO: 459 - RNA, 19 nt, Artificial Sequence
  Description of Artificial Sequence:  Target Sequence/siNA sense region
ccucuucucccugcagcuu

SEQ ID NO: 460 - RNA, 19 nt, Artificial Sequence
  Description of Artificial Sequence:  Target Sequence/siNA sense region
uuguggugcuggcuucccc

SEQ ID NO: 461 - RNA, 19 nt, Artificial Sequence
  Description of Artificial Sequence:  Target Sequence/siNA sense region
ccucaaccagucugaagug

SEQ ID NO: 462 - RNA, 19 nt, Artificial Sequence
  Description of Artificial Sequence:  Target Sequence/siNA sense region
gcuggccucugucggaggg

SEQ ID NO: 463 - RNA, 19 nt, Artificial Sequence
  Description of Artificial Sequence:  Target Sequence/siNA sense region
gagcaugaucauuggaggu

SEQ ID NO: 464 - RNA, 19 nt, Artificial Sequence
  Description of Artificial Sequence:  Target Sequence/siNA sense region
uaucgaccacucgcuguac

SEQ ID NO: 465 - RNA, 19 nt, Artificial Sequence
  Description of Artificial Sequence:  Target Sequence/siNA sense region
cacaggcagucucugguau

SEQ ID NO: 466 - RNA, 19 nt, Artificial Sequence
  Description of Artificial Sequence:  Target Sequence/siNA sense region
uacacccauccggcgggag

SEQ ID NO: 467 - RNA, 19 nt, Artificial Sequence
  Description of Artificial Sequence:  Target Sequence/siNA sense region
gugguauuaugaggucauc

SEQ ID NO: 468 - RNA, 19 nt, Artificial Sequence
  Description of Artificial Sequence:  Target Sequence/siNA sense region
cauugugcggguggagauc

SEQ ID NO: 469 - RNA, 19 nt, Artificial Sequence
  Description of Artificial Sequence:  Target Sequence/siNA sense region
caauggacaggaucugaaa

SEQ ID NO: 470 - RNA, 19 nt, Artificial Sequence
  Description of Artificial Sequence:  Target Sequence/siNA sense region
aauggacugcaaggaguac

SEQ ID NO: 471 - RNA, 19 nt, Artificial Sequence
  Description of Artificial Sequence:  Target Sequence/siNA sense region
caacuaugacaagagcauu

SEQ ID NO: 472 - RNA, 19 nt, Artificial Sequence
  Description of Artificial Sequence:  Target Sequence/siNA sense region
uguggacaguggcaccacc

SEQ ID NO: 473 - RNA, 19 nt, Artificial Sequence
  Description of Artificial Sequence:  Target Sequence/siNA sense region
caaccuucguuugcccaag

SEQ ID NO: 474 - RNA, 19 nt, Artificial Sequence
  Description of Artificial Sequence:  Target Sequence/siNA sense region
gaaaguguuugaagcugca

SEQ ID NO: 475 - RNA, 19 nt, Artificial Sequence
  Description of Artificial Sequence:  Target Sequence/siNA sense region
agucaaauccaucaaggca

SEQ ID NO: 476 - RNA, 19 nt, Artificial Sequence
  Description of Artificial Sequence:  Target Sequence/siNA sense region
agccuccuccacggagaag

SEQ ID NO: 477 - RNA, 19 nt, Artificial Sequence
  Description of Artificial Sequence:  Target Sequence/siNA sense region
guucccugaugguuucugg

SEQ ID NO: 478 - RNA, 19 nt, Artificial Sequence
  Description of Artificial Sequence:  Target Sequence/siNA sense region
gcuaggagagcagcuggug

SEQ ID NO: 479 - RNA, 19 nt, Artificial Sequence
  Description of Artificial Sequence:  Target Sequence/siNA sense region
gugcuggcaagcaggcacc

SEQ ID NO: 480 - RNA, 19 nt, Artificial Sequence
  Description of Artificial Sequence:  Target Sequence/siNA sense region
caccccuuggaacauuuuc

SEQ ID NO: 481 - RNA, 19 nt, Artificial Sequence
  Description of Artificial Sequence:  Target Sequence/siNA sense region
cccagucaucucacucuac

SEQ ID NO: 482 - RNA, 19 nt, Artificial Sequence
  Description of Artificial Sequence:  Target Sequence/siNA sense region
ccuaaugggugagguuacc

SEQ ID NO: 483 - RNA, 19 nt, Artificial Sequence
  Description of Artificial Sequence:  Target Sequence/siNA sense region
caaccaguccuuccgcauc

SEQ ID NO: 484 - RNA, 19 nt, Artificial Sequence
  Description of Artificial Sequence:  Target Sequence/siNA sense region
caccauccuuccgcagcaa

SEQ ID NO: 485 - RNA, 19 nt, Artificial Sequence
  Description of Artificial Sequence:  Target Sequence/siNA sense region
auaccugcggccaguggaa

SEQ ID NO: 486 - RNA, 19 nt, Artificial Sequence
  Description of Artificial Sequence:  Target Sequence/siNA sense region
agauguggccacgucccaa

SEQ ID NO: 487 - RNA, 19 nt, Artificial Sequence
  Description of Artificial Sequence:  Target Sequence/siNA sense region
agacgacuguuacaaguuu

SEQ ID NO: 488 - RNA, 19 nt, Artificial Sequence
  Description of Artificial Sequence:  Target Sequence/siNA sense region
ugccaucucacagucaucc

SEQ ID NO: 489 - RNA, 19 nt, Artificial Sequence
  Description of Artificial Sequence:  Target Sequence/siNA sense region
cacgggcacuguuauggga

SEQ ID NO: 490 - RNA, 19 nt, Artificial Sequence
  Description of Artificial Sequence:  Target Sequence/siNA sense region
agcuguuaucauggagggc

SEQ ID NO: 491 - RNA, 19 nt, Artificial Sequence
  Description of Artificial Sequence:  Target Sequence/siNA sense region
cuucuacguugucuuugau

SEQ ID NO: 492 - RNA, 19 nt, Artificial Sequence
  Description of Artificial Sequence:  Target Sequence/siNA sense region
ucgggcccgaaaacgaauu

SEQ ID NO: 493 - RNA, 19 nt, Artificial Sequence
  Description of Artificial Sequence:  Target Sequence/siNA sense region
uggcuuugcugucagcgcu

SEQ ID NO: 494 - RNA, 19 nt, Artificial Sequence
  Description of Artificial Sequence:  Target Sequence/siNA sense region
uugccaugugcacgaugag

SEQ ID NO: 495 - RNA, 19 nt, Artificial Sequence
  Description of Artificial Sequence:  Target Sequence/siNA sense region
guucaggacggcagcggug

SEQ ID NO: 496 - RNA, 19 nt, Artificial Sequence
  Description of Artificial Sequence:  Target Sequence/siNA sense region
ggaaggcccuuuugucacc

SEQ ID NO: 497 - RNA, 19 nt, Artificial Sequence
  Description of Artificial Sequence:  Target Sequence/siNA sense region
cuuggacauggaagacugu

SEQ ID NO: 498 - RNA, 19 nt, Artificial Sequence
  Description of Artificial Sequence:  Target Sequence/siNA sense region
uggcuacaacauuccacag

SEQ ID NO: 499 - RNA, 19 nt, Artificial Sequence
  Description of Artificial Sequence:  Target Sequence/siNA sense region
gacagaugagucaacccuc

SEQ ID NO: 500 - RNA, 19 nt, Artificial Sequence
  Description of Artificial Sequence:  Target Sequence/siNA sense region
caugaccauagccuauguc

SEQ ID NO: 501 - RNA, 19 nt, Artificial Sequence
  Description of Artificial Sequence:  Target Sequence/siNA sense region
cauggcugccaucugcgcc

SEQ ID NO: 502 - RNA, 19 nt, Artificial Sequence
  Description of Artificial Sequence:  Target Sequence/siNA sense region
ccucuucaugcugccacuc

SEQ ID NO: 503 - RNA, 19 nt, Artificial Sequence
  Description of Artificial Sequence:  Target Sequence/siNA sense region
cugccucauggugugucag

SEQ ID NO: 504 - RNA, 19 nt, Artificial Sequence
  Description of Artificial Sequence:  Target Sequence/siNA sense region
guggcgcugccuccgcugc

SEQ ID NO: 505 - RNA, 19 nt, Artificial Sequence
  Description of Artificial Sequence:  Target Sequence/siNA sense region
ccugcgccagcagcaugau

SEQ ID NO: 506 - RNA, 19 nt, Artificial Sequence
  Description of Artificial Sequence:  Target Sequence/siNA sense region
ugacuuugcugaugacauc

SEQ ID NO: 507 - RNA, 19 nt, Artificial Sequence
  Description of Artificial Sequence:  Target Sequence/siNA sense region
cucccugcugaagugagga

SEQ ID NO: 508 - RNA, 19 nt, Artificial Sequence
  Description of Artificial Sequence:  Target Sequence/siNA sense region
aggcccaugggcagaagau

SEQ ID NO: 509 - RNA, 19 nt, Artificial Sequence
  Description of Artificial Sequence:  Target Sequence/siNA sense region
uagagauuccccuggacca

SEQ ID NO: 510 - RNA, 19 nt, Artificial Sequence
  Description of Artificial Sequence:  Target Sequence/siNA sense region
acaccuccgugguucacuu

SEQ ID NO: 511 - RNA, 19 nt, Artificial Sequence
  Description of Artificial Sequence:  Target Sequence/siNA sense region
uuggucacaaguaggagac

SEQ ID NO: 512 - RNA, 19 nt, Artificial Sequence
  Description of Artificial Sequence:  Target Sequence/siNA sense region
cacagauggcaccuguggc

SEQ ID NO: 513 - RNA, 19 nt, Artificial Sequence
  Description of Artificial Sequence:  Target Sequence/siNA sense region
ccagagcaccucaggaccc

SEQ ID NO: 514 - RNA, 19 nt, Artificial Sequence
  Description of Artificial Sequence:  Target Sequence/siNA sense region
cuccccacccaccaaaugc

SEQ ID NO: 515 - RNA, 19 nt, Artificial Sequence
  Description of Artificial Sequence:  Target Sequence/siNA sense region
ccucugccuugauggagaa

SEQ ID NO: 516 - RNA, 19 nt, Artificial Sequence
  Description of Artificial Sequence:  Target Sequence/siNA sense region
aggaaaaggcuggcaaggu

SEQ ID NO: 517 - RNA, 19 nt, Artificial Sequence
  Description of Artificial Sequence:  Target Sequence/siNA sense region
uggguuccagggacuguac

SEQ ID NO: 518 - RNA, 19 nt, Artificial Sequence
  Description of Artificial Sequence:  Target Sequence/siNA sense region
ccuguaggaaacagaaaag

SEQ ID NO: 519 - RNA, 19 nt, Artificial Sequence
  Description of Artificial Sequence:  Target Sequence/siNA sense region
gagaagaaagaagcacucu

SEQ ID NO: 520 - RNA, 19 nt, Artificial Sequence
  Description of Artificial Sequence:  Target Sequence/siNA sense region
ugcuggcgggaauacucuu

SEQ ID NO: 521 - RNA, 19 nt, Artificial Sequence
  Description of Artificial Sequence:  Target Sequence/siNA sense region
uggucaccucaaauuuaag

SEQ ID NO: 522 - RNA, 19 nt, Artificial Sequence
  Description of Artificial Sequence:  Target Sequence/siNA sense region
gucgggaaauucugcugcu

SEQ ID NO: 523 - RNA, 19 nt, Artificial Sequence
  Description of Artificial Sequence:  Target Sequence/siNA sense region
uugaaacuucagcccugaa

SEQ ID NO: 524 - RNA, 19 nt, Artificial Sequence
  Description of Artificial Sequence:  Target Sequence/siNA sense region
accuuuguccaccauuccu

SEQ ID NO: 525 - RNA, 19 nt, Artificial Sequence
  Description of Artificial Sequence:  Target Sequence/siNA sense region
uuuaaauucuccaacccaa

SEQ ID NO: 526 - RNA, 19 nt, Artificial Sequence
  Description of Artificial Sequence:  Target Sequence/siNA sense region
aaguauucuucuuuucuua

SEQ ID NO: 527 - RNA, 19 nt, Artificial Sequence
  Description of Artificial Sequence:  Target Sequence/siNA sense region
aguuucagaaguacuggca

SEQ ID NO: 528 - RNA, 19 nt, Artificial Sequence
  Description of Artificial Sequence:  Target Sequence/siNA sense region
aucacacgcagguuaccuu

SEQ ID NO: 529 - RNA, 19 nt, Artificial Sequence
  Description of Artificial Sequence:  Target Sequence/siNA sense region
uggcgugugucccuguggu

SEQ ID NO: 530 - RNA, 19 nt, Artificial Sequence
  Description of Artificial Sequence:  Target Sequence/siNA sense region
uacccuggcagagaagaga

SEQ ID NO: 531 - RNA, 19 nt, Artificial Sequence
  Description of Artificial Sequence:  Target Sequence/siNA sense region
accaagcuuguuucccugc

SEQ ID NO: 532 - RNA, 19 nt, Artificial Sequence
  Description of Artificial Sequence:  Target Sequence/siNA sense region
cuggccaaagucaguagga

SEQ ID NO: 533 - RNA, 19 nt, Artificial Sequence
  Description of Artificial Sequence:  Target Sequence/siNA sense region
agaggaugcacaguuugcu

SEQ ID NO: 534 - RNA, 19 nt, Artificial Sequence
  Description of Artificial Sequence:  Target Sequence/siNA sense region
uauuugcuuuagagacagg

SEQ ID NO: 535 - RNA, 19 nt, Artificial Sequence
  Description of Artificial Sequence:  Target Sequence/siNA sense region
ggacuguauaaacaagccu

SEQ ID NO: 536 - RNA, 19 nt, Artificial Sequence
  Description of Artificial Sequence:  Target Sequence/siNA sense region
uaacauuggugcaaagauu

SEQ ID NO: 537 - RNA, 19 nt, Artificial Sequence
  Description of Artificial Sequence:  Target Sequence/siNA sense region
ugccucuugaauuaaaaaa

SEQ ID NO: 538 - RNA, 19 nt, Artificial Sequence
  Description of Artificial Sequence:  Target Sequence/siNA sense region
aaaaaacuagauugacuau

SEQ ID NO: 539 - RNA, 19 nt, Artificial Sequence
  Description of Artificial Sequence:  Target Sequence/siNA sense region
uuuauacaaaugggggcgg

SEQ ID NO: 540 - RNA, 19 nt, Artificial Sequence
  Description of Artificial Sequence:  Target Sequence/siNA sense region
gcuggaaagaggagaagga

SEQ ID NO: 541 - RNA, 19 nt, Artificial Sequence
  Description of Artificial Sequence:  Target Sequence/siNA sense region
agagggaguacaaagacag

SEQ ID NO: 542 - RNA, 19 nt, Artificial Sequence
  Description of Artificial Sequence:  Target Sequence/siNA sense region
gggaauagugggaucaaag

SEQ ID NO: 543 - RNA, 19 nt, Artificial Sequence
  Description of Artificial Sequence:  Target Sequence/siNA sense region
gcuaggaaaggcagaaaca

SEQ ID NO: 544 - RNA, 19 nt, Artificial Sequence
  Description of Artificial Sequence:  Target Sequence/siNA sense region
acaaccacucaccaguccu

SEQ ID NO: 545 - RNA, 19 nt, Artificial Sequence
  Description of Artificial Sequence:  Target Sequence/siNA sense region
uaguuuuagaccucaucuc

SEQ ID NO: 546 - RNA, 19 nt, Artificial Sequence
  Description of Artificial Sequence:  Target Sequence/siNA sense region
ccaagauagcaucccaucu

SEQ ID NO: 547 - RNA, 19 nt, Artificial Sequence
  Description of Artificial Sequence:  Target Sequence/siNA sense region
ucagaagauggguguuguu

SEQ ID NO: 548 - RNA, 19 nt, Artificial Sequence
  Description of Artificial Sequence:  Target Sequence/siNA sense region
uuucaauguuuucuuuucu

SEQ ID NO: 549 - RNA, 19 nt, Artificial Sequence
  Description of Artificial Sequence:  Target Sequence/siNA sense region
ugugguugcagccugacca

SEQ ID NO: 550 - RNA, 19 nt, Artificial Sequence
  Description of Artificial Sequence:  Target Sequence/siNA sense region
aaaagugagaugggaaggg

SEQ ID NO: 551 - RNA, 19 nt, Artificial Sequence
  Description of Artificial Sequence:  Target Sequence/siNA sense region
gcuuaucuagccaaagagc

SEQ ID NO: 552 - RNA, 19 nt, Artificial Sequence
  Description of Artificial Sequence:  Target Sequence/siNA sense region
cucuuuuuuagcucucuua

SEQ ID NO: 553 - RNA, 19 nt, Artificial Sequence
  Description of Artificial Sequence:  Target Sequence/siNA sense region
aaaugaagugcccacuaag

SEQ ID NO: 554 - RNA, 19 nt, Artificial Sequence
  Description of Artificial Sequence:  Target Sequence/siNA sense region
gaaguuccacuuaacacau

SEQ ID NO: 555 - RNA, 19 nt, Artificial Sequence
  Description of Artificial Sequence:  Target Sequence/siNA sense region
ugaauuucugccauauuaa

SEQ ID NO: 556 - RNA, 19 nt, Artificial Sequence
  Description of Artificial Sequence:  Target Sequence/siNA sense region
auuucauugucucuaucug

SEQ ID NO: 557 - RNA, 19 nt, Artificial Sequence
  Description of Artificial Sequence:  Target Sequence/siNA sense region
gaaccacccuuuauucuac

SEQ ID NO: 558 - RNA, 19 nt, Artificial Sequence
  Description of Artificial Sequence:  Target Sequence/siNA sense region
cauaugauaggcagcacug

SEQ ID NO: 559 - RNA, 19 nt, Artificial Sequence
  Description of Artificial Sequence:  Target Sequence/siNA sense region
gaaauauccuaacccccua

SEQ ID NO: 560 - RNA, 19 nt, Artificial Sequence
  Description of Artificial Sequence:  Target Sequence/siNA sense region
aagcuccaggugcccugug

SEQ ID NO: 561 - RNA, 19 nt, Artificial Sequence
  Description of Artificial Sequence:  Target Sequence/siNA sense region
gggagagcaacuggacuau

SEQ ID NO: 562 - RNA, 19 nt, Artificial Sequence
  Description of Artificial Sequence:  Target Sequence/siNA sense region
uagcagggcugggcucugu

SEQ ID NO: 563 - RNA, 19 nt, Artificial Sequence
  Description of Artificial Sequence:  Target Sequence/siNA sense region
ucuuccuggucauaggcuc

SEQ ID NO: 564 - RNA, 19 nt, Artificial Sequence
  Description of Artificial Sequence:  Target Sequence/siNA sense region
cacucuuucccccaaaucu

SEQ ID NO: 565 - RNA, 19 nt, Artificial Sequence
  Description of Artificial Sequence:  Target Sequence/siNA sense region
uuccucuggagcuuugcag

SEQ ID NO: 566 - RNA, 19 nt, Artificial Sequence
  Description of Artificial Sequence:  Target Sequence/siNA sense region
gccaaggugcuaaaaggaa

SEQ ID NO: 567 - RNA, 19 nt, Artificial Sequence
  Description of Artificial Sequence:  Target Sequence/siNA sense region
auagguaggagaccucuuc

SEQ ID NO: 568 - RNA, 19 nt, Artificial Sequence
  Description of Artificial Sequence:  Target Sequence/siNA sense region
cuaucuaauccuuaaaagc

SEQ ID NO: 569 - RNA, 19 nt, Artificial Sequence
  Description of Artificial Sequence:  Target Sequence/siNA sense region
cauaauguugaacauucau

SEQ ID NO: 570 - RNA, 19 nt, Artificial Sequence
  Description of Artificial Sequence:  Target Sequence/siNA sense region
uucaacagcugaugcccua

SEQ ID NO: 571 - RNA, 19 nt, Artificial Sequence
  Description of Artificial Sequence:  Target Sequence/siNA sense region
auaaccccugccuggauuu

SEQ ID NO: 572 - RNA, 19 nt, Artificial Sequence
  Description of Artificial Sequence:  Target Sequence/siNA sense region
ucuuccuauuaggcuauaa

SEQ ID NO: 573 - RNA, 19 nt, Artificial Sequence
  Description of Artificial Sequence:  Target Sequence/siNA sense region
agaaguagcaagaucuuua

SEQ ID NO: 574 - RNA, 19 nt, Artificial Sequence
  Description of Artificial Sequence:  Target Sequence/siNA sense region
acauaauucagagugguuu

SEQ ID NO: 575 - RNA, 19 nt, Artificial Sequence
  Description of Artificial Sequence:  Target Sequence/siNA sense region
ucauugccuuccuacccuc

SEQ ID NO: 576 - RNA, 19 nt, Artificial Sequence
  Description of Artificial Sequence:  Target Sequence/siNA sense region
cucuaauggccccuccauu

SEQ ID NO: 577 - RNA, 19 nt, Artificial Sequence
  Description of Artificial Sequence:  Target Sequence/siNA sense region
uuauuugacuaaagcauca

SEQ ID NO: 578 - RNA, 19 nt, Artificial Sequence
  Description of Artificial Sequence:  Target Sequence/siNA sense region
acacaguggcacuagcauu

SEQ ID NO: 579 - RNA, 19 nt, Artificial Sequence
  Description of Artificial Sequence:  Target Sequence/siNA sense region
uauaccaagaguaugagaa

SEQ ID NO: 580 - RNA, 19 nt, Artificial Sequence
  Description of Artificial Sequence:  Target Sequence/siNA sense region
aauacagugcuuuauggcu

SEQ ID NO: 581 - RNA, 19 nt, Artificial Sequence
  Description of Artificial Sequence:  Target Sequence/siNA sense region
ucuaacauuacugccuuca

SEQ ID NO: 582 - RNA, 19 nt, Artificial Sequence
  Description of Artificial Sequence:  Target Sequence/siNA sense region
aguaucaaggcugccugga

SEQ ID NO: 583 - RNA, 19 nt, Artificial Sequence
  Description of Artificial Sequence:  Target Sequence/siNA sense region
agaaaggauggcagccuca

SEQ ID NO: 584 - RNA, 19 nt, Artificial Sequence
  Description of Artificial Sequence:  Target Sequence/siNA sense region
agggcuuccuuauguccuc

SEQ ID NO: 585 - RNA, 19 nt, Artificial Sequence
  Description of Artificial Sequence:  Target Sequence/siNA sense region
ccaccacaagagcuccuug

SEQ ID NO: 586 - RNA, 19 nt, Artificial Sequence
  Description of Artificial Sequence:  Target Sequence/siNA sense region
gaugaaggucaucuuuuuc

SEQ ID NO: 587 - RNA, 19 nt, Artificial Sequence
  Description of Artificial Sequence:  Target Sequence/siNA sense region
ccccuauccuguucuuccc

SEQ ID NO: 588 - RNA, 19 nt, Artificial Sequence
  Description of Artificial Sequence:  Target Sequence/siNA sense region
ccuccccgcuccuaauggu

SEQ ID NO: 589 - RNA, 19 nt, Artificial Sequence
  Description of Artificial Sequence:  Target Sequence/siNA sense region
uacguggguacccaggcug

SEQ ID NO: 590 - RNA, 19 nt, Artificial Sequence
  Description of Artificial Sequence:  Target Sequence/siNA sense region
gguucuugggcuagguagu

SEQ ID NO: 591 - RNA, 19 nt, Artificial Sequence
  Description of Artificial Sequence:  Target Sequence/siNA sense region
uggggaccaaguucauuac

SEQ ID NO: 592 - RNA, 19 nt, Artificial Sequence
  Description of Artificial Sequence:  Target Sequence/siNA sense region
ccucccuaucaguucuagc

SEQ ID NO: 593 - RNA, 19 nt, Artificial Sequence
  Description of Artificial Sequence:  Target Sequence/siNA sense region
cauaguaaacuacgguacc

SEQ ID NO: 594 - RNA, 19 nt, Artificial Sequence
  Description of Artificial Sequence:  Target Sequence/siNA sense region
caguguuagugggaagagc

SEQ ID NO: 595 - RNA, 19 nt, Artificial Sequence
  Description of Artificial Sequence:  Target Sequence/siNA sense region
cuggguuuuccuaguauac

SEQ ID NO: 596 - RNA, 19 nt, Artificial Sequence
  Description of Artificial Sequence:  Target Sequence/siNA sense region
cccacugcauccuacuccu

SEQ ID NO: 597 - RNA, 19 nt, Artificial Sequence
  Description of Artificial Sequence:  Target Sequence/siNA sense region
uaccuggucaacccgcugc

SEQ ID NO: 598 - RNA, 19 nt, Artificial Sequence
  Description of Artificial Sequence:  Target Sequence/siNA sense region
cuuccagguaugggaccug

SEQ ID NO: 599 - RNA, 19 nt, Artificial Sequence
  Description of Artificial Sequence:  Target Sequence/siNA sense region
gcuaaguguggaauuaccu

SEQ ID NO: 600 - RNA, 19 nt, Artificial Sequence
  Description of Artificial Sequence:  Target Sequence/siNA sense region
ugauaagggagagggaaau

SEQ ID NO: 601 - RNA, 19 nt, Artificial Sequence
  Description of Artificial Sequence:  Target Sequence/siNA sense region
uacaaggagggccucuggu

SEQ ID NO: 602 - RNA, 19 nt, Artificial Sequence
  Description of Artificial Sequence:  Target Sequence/siNA sense region
uguuccuggccucagccag

SEQ ID NO: 603 - RNA, 19 nt, Artificial Sequence
  Description of Artificial Sequence:  Target Sequence/siNA sense region
gcugcccacaagccauaaa

SEQ ID NO: 604 - RNA, 19 nt, Artificial Sequence
  Description of Artificial Sequence:  Target Sequence/siNA sense region
accaauaaaacaagaauac

SEQ ID NO: 605 - RNA, 19 nt, Artificial Sequence
  Description of Artificial Sequence:  Target Sequence/siNA sense region
cugagucaguuuuuuaucu

SEQ ID NO: 606 - RNA, 19 nt, Artificial Sequence
  Description of Artificial Sequence:  Target Sequence/siNA sense region
uggguucucuucauuccca

SEQ ID NO: 607 - RNA, 19 nt, Artificial Sequence
  Description of Artificial Sequence:  Target Sequence/siNA sense region
acugcacuuggugcugcuu

SEQ ID NO: 608 - RNA, 19 nt, Artificial Sequence
  Description of Artificial Sequence:  Target Sequence/siNA sense region
uuggcugacugggaacacc

SEQ ID NO: 609 - RNA, 19 nt, Artificial Sequence
  Description of Artificial Sequence:  Target Sequence/siNA sense region
cccauaacuacagagucug

SEQ ID NO: 610 - RNA, 19 nt, Artificial Sequence
  Description of Artificial Sequence:  Target Sequence/siNA sense region
gacaggaagacuggagacu

SEQ ID NO: 611 - RNA, 19 nt, Artificial Sequence
  Description of Artificial Sequence:  Target Sequence/siNA sense region
uguccacuucuagcucgga

SEQ ID NO: 612 - RNA, 19 nt, Artificial Sequence
  Description of Artificial Sequence:  Target Sequence/siNA sense region
aacuuacuguguaaauaaa

SEQ ID NO: 613 - RNA, 19 nt, Artificial Sequence
  Description of Artificial Sequence:  Target Sequence/siNA sense region
acuuucagaacugcuacca

SEQ ID NO: 614 - RNA, 19 nt, Artificial Sequence
  Description of Artificial Sequence:  Target Sequence/siNA sense region
augaagugaaaaugccaca

SEQ ID NO: 615 - RNA, 19 nt, Artificial Sequence
  Description of Artificial Sequence:  Target Sequence/siNA sense region
auuuugcuuuauaauuucu

SEQ ID NO: 616 - RNA, 19 nt, Artificial Sequence
  Description of Artificial Sequence:  Target Sequence/siNA sense region
uacccauguugggaaaaac

SEQ ID NO: 617 - RNA, 19 nt, Artificial Sequence
  Description of Artificial Sequence:  Target Sequence/siNA sense region
cuggcuuuuucccagcccu

SEQ ID NO: 618 - RNA, 19 nt, Artificial Sequence
  Description of Artificial Sequence:  Target Sequence/siNA sense region
uuuccagggcauaaaacuc

SEQ ID NO: 619 - RNA, 19 nt, Artificial Sequence
  Description of Artificial Sequence:  Target Sequence/siNA sense region
caaccccuucgauagcaag

SEQ ID NO: 620 - RNA, 19 nt, Artificial Sequence
  Description of Artificial Sequence:  Target Sequence/siNA sense region
gucccaucagccuauuauu

SEQ ID NO: 621 - RNA, 19 nt, Artificial Sequence
  Description of Artificial Sequence:  Target Sequence/siNA sense region
uuuuuuaaagaaaacuugc

SEQ ID NO: 622 - RNA, 19 nt, Artificial Sequence
  Description of Artificial Sequence:  Target Sequence/siNA sense region
cacuuguuuuucuuuuuac

SEQ ID NO: 623 - RNA, 19 nt, Artificial Sequence
  Description of Artificial Sequence:  Target Sequence/siNA sense region
caguuacuuccuuccugcc

SEQ ID NO: 624 - RNA, 19 nt, Artificial Sequence
  Description of Artificial Sequence:  Target Sequence/siNA sense region
cccaaaauuauaaacucua

SEQ ID NO: 625 - RNA, 19 nt, Artificial Sequence
  Description of Artificial Sequence:  Target Sequence/siNA sense region
aaguguaaaaaaaagucuu

SEQ ID NO: 626 - RNA, 19 nt, Artificial Sequence
  Description of Artificial Sequence:  Target Sequence/siNA sense region
uaacaacagcuucuugcuu

SEQ ID NO: 627 - RNA, 19 nt, Artificial Sequence
  Description of Artificial Sequence:  Target Sequence/siNA sense region
uguaaaaauauguauuaua

SEQ ID NO: 628 - RNA, 19 nt, Artificial Sequence
  Description of Artificial Sequence:  Target Sequence/siNA sense region
acaucuguauuuuuaaauu

SEQ ID NO: 629 - RNA, 19 nt, Artificial Sequence
  Description of Artificial Sequence:  Target Sequence/siNA sense region
ucugcuccugaaaaaugac

SEQ ID NO: 630 - RNA, 19 nt, Artificial Sequence
  Description of Artificial Sequence:  Target Sequence/siNA sense region
cugucccauucuccacuca

SEQ ID NO: 631 - RNA, 19 nt, Artificial Sequence
  Description of Artificial Sequence:  Target Sequence/siNA sense region
acugcauuuggggccuuuc

SEQ ID NO: 632 - RNA, 19 nt, Artificial Sequence
  Description of Artificial Sequence:  Target Sequence/siNA sense region
cccauuggucugcaugucu

SEQ ID NO: 633 - RNA, 19 nt, Artificial Sequence
  Description of Artificial Sequence:  Target Sequence/siNA sense region
uuuuaucauugcaggccag

SEQ ID NO: 634 - RNA, 19 nt, Artificial Sequence
  Description of Artificial Sequence:  Target Sequence/siNA sense region
guggacagagggagaaggg

SEQ ID NO: 635 - RNA, 19 nt, Artificial Sequence
  Description of Artificial Sequence:  Target Sequence/siNA sense region
gagaacaggggucgccaac

SEQ ID NO: 636 - RNA, 19 nt, Artificial Sequence
  Description of Artificial Sequence:  Target Sequence/siNA sense region
cacuuguguugcuuucuga

SEQ ID NO: 637 - RNA, 19 nt, Artificial Sequence
  Description of Artificial Sequence:  Target Sequence/siNA sense region
acugauccugaacaagaaa

SEQ ID NO: 638 - RNA, 19 nt, Artificial Sequence
  Description of Artificial Sequence:  Target Sequence/siNA sense region
agaguaacacugaggcgcu

SEQ ID NO: 639 - RNA, 19 nt, Artificial Sequence
  Description of Artificial Sequence:  Target Sequence/siNA sense region
ucgcucccaugcacaacuc

SEQ ID NO: 640 - RNA, 19 nt, Artificial Sequence
  Description of Artificial Sequence:  Target Sequence/siNA sense region
cuccaaaacacuuauccuc

SEQ ID NO: 641 - RNA, 19 nt, Artificial Sequence
  Description of Artificial Sequence:  Target Sequence/siNA sense region
ccugcaagagugggcuuuc

SEQ ID NO: 642 - RNA, 19 nt, Artificial Sequence
  Description of Artificial Sequence:  Target Sequence/siNA sense region
ccagggucuuuacugggaa

SEQ ID NO: 643 - RNA, 19 nt, Artificial Sequence
  Description of Artificial Sequence:  Target Sequence/siNA sense region
agcaguuaagcccccuccu

SEQ ID NO: 644 - RNA, 19 nt, Artificial Sequence
  Description of Artificial Sequence:  Target Sequence/siNA sense region
ucaccccuuccuuuuuucu

SEQ ID NO: 645 - RNA, 19 nt, Artificial Sequence
  Description of Artificial Sequence:  Target Sequence/siNA sense region
uuucuuuacuccuuuggcu

SEQ ID NO: 646 - RNA, 19 nt, Artificial Sequence
  Description of Artificial Sequence:  Target Sequence/siNA sense region
uucaaaggauuuuggaaaa

SEQ ID NO: 647 - RNA, 19 nt, Artificial Sequence
  Description of Artificial Sequence:  Target Sequence/siNA sense region
agaaacaauaugcuuuaca

SEQ ID NO: 648 - RNA, 19 nt, Artificial Sequence
  Description of Artificial Sequence:  Target Sequence/siNA sense region
acucauuuucaauuucuaa

SEQ ID NO: 649 - RNA, 19 nt, Artificial Sequence
  Description of Artificial Sequence:  Target Sequence/siNA sense region
aauuugcaggggauacuga

SEQ ID NO: 650 - RNA, 19 nt, Artificial Sequence
  Description of Artificial Sequence:  Target Sequence/siNA sense region
aaaaauacggcagguggcc

SEQ ID NO: 651 - RNA, 19 nt, Artificial Sequence
  Description of Artificial Sequence:  Target Sequence/siNA sense region
cuaaggcugcuguaaaguu

SEQ ID NO: 652 - RNA, 19 nt, Artificial Sequence
  Description of Artificial Sequence:  Target Sequence/siNA sense region
ugaggggagaggaaaucuu

SEQ ID NO: 653 - RNA, 19 nt, Artificial Sequence
  Description of Artificial Sequence:  Target Sequence/siNA sense region
uaagauuacaagauaaaaa

SEQ ID NO: 654 - RNA, 19 nt, Artificial Sequence
  Description of Artificial Sequence:  Target Sequence/siNA sense region
aacgaauccccuaaacaaa

SEQ ID NO: 655 - RNA, 19 nt, Artificial Sequence
  Description of Artificial Sequence:  Target Sequence/siNA sense region
aaagaacaauagaacuggu

SEQ ID NO: 656 - RNA, 19 nt, Artificial Sequence
  Description of Artificial Sequence:  Target Sequence/siNA sense region
ucuuccauuuugccaccuu

SEQ ID NO: 657 - RNA, 19 nt, Artificial Sequence
  Description of Artificial Sequence:  Target Sequence/siNA sense region
uuccuguucaugacagcua

SEQ ID NO: 658 - RNA, 19 nt, Artificial Sequence
  Description of Artificial Sequence:  Target Sequence/siNA sense region
acuaaccuggagacaguaa

SEQ ID NO: 659 - RNA, 19 nt, Artificial Sequence
  Description of Artificial Sequence:  Target Sequence/siNA sense region
acauuucauuaaccaaaga

SEQ ID NO: 660 - RNA, 19 nt, Artificial Sequence
  Description of Artificial Sequence:  Target Sequence/siNA sense region
aaagugggucaccugaccu

SEQ ID NO: 661 - RNA, 19 nt, Artificial Sequence
  Description of Artificial Sequence:  Target Sequence/siNA sense region
ucugaagagcugaguacuc

SEQ ID NO: 662 - RNA, 19 nt, Artificial Sequence
  Description of Artificial Sequence:  Target Sequence/siNA sense region
caggccacuccaaucaccc

SEQ ID NO: 663 - RNA, 19 nt, Artificial Sequence
  Description of Artificial Sequence:  Target Sequence/siNA sense region
cuacaagaugccaaggagg

SEQ ID NO: 664 - RNA, 19 nt, Artificial Sequence
  Description of Artificial Sequence:  Target Sequence/siNA sense region
gucccaggaaguccagcuc

SEQ ID NO: 665 - RNA, 19 nt, Artificial Sequence
  Description of Artificial Sequence:  Target Sequence/siNA sense region
ccuuaaacugacgcuaguc

SEQ ID NO: 666 - RNA, 19 nt, Artificial Sequence
  Description of Artificial Sequence:  Target Sequence/siNA sense region
caauaaaccugggcaagug

SEQ ID NO: 667 - RNA, 19 nt, Artificial Sequence
  Description of Artificial Sequence:  Target Sequence/siNA sense region
gaggcaagagaaaugagga

SEQ ID NO: 668 - RNA, 19 nt, Artificial Sequence
  Description of Artificial Sequence:  Target Sequence/siNA sense region
aagaauccaucugugaggu

SEQ ID NO: 669 - RNA, 19 nt, Artificial Sequence
  Description of Artificial Sequence:  Target Sequence/siNA sense region
ugacaggcaaggaugaaag

SEQ ID NO: 670 - RNA, 19 nt, Artificial Sequence
  Description of Artificial Sequence:  Target Sequence/siNA sense region
gacaaagaaggaaaagagu

SEQ ID NO: 671 - RNA, 19 nt, Artificial Sequence
  Description of Artificial Sequence:  Target Sequence/siNA sense region
uaucaaaggcagaaaggag

SEQ ID NO: 672 - RNA, 19 nt, Artificial Sequence
  Description of Artificial Sequence:  Target Sequence/siNA sense region
gaucauuuaguugggucug

SEQ ID NO: 673 - RNA, 19 nt, Artificial Sequence
  Description of Artificial Sequence:  Target Sequence/siNA sense region
gaaaggaaaagucuuugcu

SEQ ID NO: 674 - RNA, 19 nt, Artificial Sequence
  Description of Artificial Sequence:  Target Sequence/siNA sense region
uauccgacauguacugcua

SEQ ID NO: 675 - RNA, 19 nt, Artificial Sequence
  Description of Artificial Sequence:  Target Sequence/siNA sense region
aguaccuguaagcauuuua

SEQ ID NO: 676 - RNA, 19 nt, Artificial Sequence
  Description of Artificial Sequence:  Target Sequence/siNA sense region
aggucccagaauggaaaaa

SEQ ID NO: 677 - RNA, 19 nt, Artificial Sequence
  Description of Artificial Sequence:  Target Sequence/siNA sense region
aaaaaucagcuauugguaa

SEQ ID NO: 678 - RNA, 19 nt, Artificial Sequence
  Description of Artificial Sequence:  Target Sequence/siNA sense region
auauaauaauguccuuucc

SEQ ID NO: 679 - RNA, 19 nt, Artificial Sequence
  Description of Artificial Sequence:  Target Sequence/siNA sense region
ccuggagucaguuuuuuua

SEQ ID NO: 680 - RNA, 19 nt, Artificial Sequence
  Description of Artificial Sequence:  Target Sequence/siNA sense region
aaaaaguuaacucuuaguu

SEQ ID NO: 681 - RNA, 19 nt, Artificial Sequence
  Description of Artificial Sequence:  Target Sequence/siNA sense region
uuuuacuuguuuaauucua

SEQ ID NO: 682 - RNA, 19 nt, Artificial Sequence
  Description of Artificial Sequence:  Target Sequence/siNA sense region
aaaagagaagggagcugag

SEQ ID NO: 683 - RNA, 19 nt, Artificial Sequence
  Description of Artificial Sequence:  Target Sequence/siNA sense region
ggccauucccuguaggagu

SEQ ID NO: 684 - RNA, 19 nt, Artificial Sequence
  Description of Artificial Sequence:  Target Sequence/siNA sense region
uaaagauaaaaggauagga

SEQ ID NO: 685 - RNA, 19 nt, Artificial Sequence
  Description of Artificial Sequence:  Target Sequence/siNA sense region
aaaagauucaaagcucuaa

SEQ ID NO: 686 - RNA, 19 nt, Artificial Sequence
  Description of Artificial Sequence:  Target Sequence/siNA sense region
auagagucacagcuuuccc

SEQ ID NO: 687 - RNA, 19 nt, Artificial Sequence
  Description of Artificial Sequence:  Target Sequence/siNA sense region
cagguauaaaaccuaaaau

SEQ ID NO: 688 - RNA, 19 nt, Artificial Sequence
  Description of Artificial Sequence:  Target Sequence/siNA sense region
uuaagaaguacaauaagca

SEQ ID NO: 689 - RNA, 19 nt, Artificial Sequence
  Description of Artificial Sequence:  Target Sequence/siNA sense region
agagguggaaaaugaucua

SEQ ID NO: 690 - RNA, 19 nt, Artificial Sequence
  Description of Artificial Sequence:  Target Sequence/siNA sense region
aguuccugauagcuaccca

SEQ ID NO: 691 - RNA, 19 nt, Artificial Sequence
  Description of Artificial Sequence:  Target Sequence/siNA sense region
acagagcaagugauuuaua

SEQ ID NO: 692 - RNA, 19 nt, Artificial Sequence
  Description of Artificial Sequence:  Target Sequence/siNA sense region
aaauuugaaauccaaacua

SEQ ID NO: 693 - RNA, 19 nt, Artificial Sequence
  Description of Artificial Sequence:  Target Sequence/siNA sense region
acuuucuuaauaucacuuu

SEQ ID NO: 694 - RNA, 19 nt, Artificial Sequence
  Description of Artificial Sequence:  Target Sequence/siNA sense region
uggucuccauuuuucccag

SEQ ID NO: 695 - RNA, 19 nt, Artificial Sequence
  Description of Artificial Sequence:  Target Sequence/siNA sense region
ggacaggaaauaugucccc

SEQ ID NO: 696 - RNA, 19 nt, Artificial Sequence
  Description of Artificial Sequence:  Target Sequence/siNA sense region
ccccuaacuuucuugcuuc

SEQ ID NO: 697 - RNA, 19 nt, Artificial Sequence
  Description of Artificial Sequence:  Target Sequence/siNA sense region
caaaaauuaaaauccagca

SEQ ID NO: 698 - RNA, 19 nt, Artificial Sequence
  Description of Artificial Sequence:  Target Sequence/siNA sense region
aucccaagaucauucuaca

SEQ ID NO: 699 - RNA, 19 nt, Artificial Sequence
  Description of Artificial Sequence:  Target Sequence/siNA sense region
aaguaauuuugcacagaca

SEQ ID NO: 700 - RNA, 19 nt, Artificial Sequence
  Description of Artificial Sequence:  Target Sequence/siNA sense region
aucuccucaccccagugcc

SEQ ID NO: 701 - RNA, 19 nt, Artificial Sequence
  Description of Artificial Sequence:  Target Sequence/siNA sense region
cugucuggagcucacccaa

SEQ ID NO: 702 - RNA, 19 nt, Artificial Sequence
  Description of Artificial Sequence:  Target Sequence/siNA sense region
aggucaccaaacaacuugg

SEQ ID NO: 703 - RNA, 19 nt, Artificial Sequence
  Description of Artificial Sequence:  Target Sequence/siNA sense region
guugugaaccaacugccuu

SEQ ID NO: 704 - RNA, 19 nt, Artificial Sequence
  Description of Artificial Sequence:  Target Sequence/siNA sense region
uaaccuucugggggagggg

SEQ ID NO: 705 - RNA, 19 nt, Artificial Sequence
  Description of Artificial Sequence:  Target Sequence/siNA sense region
ggauuagcuagacuaggag

SEQ ID NO: 706 - RNA, 19 nt, Artificial Sequence
  Description of Artificial Sequence:  Target Sequence/siNA sense region
gaccagaagugaaugggaa

SEQ ID NO: 707 - RNA, 19 nt, Artificial Sequence
  Description of Artificial Sequence:  Target Sequence/siNA sense region
aagggugaggacuucacaa

SEQ ID NO: 708 - RNA, 19 nt, Artificial Sequence
  Description of Artificial Sequence:  Target Sequence/siNA sense region
auguuggccugucagagcu

SEQ ID NO: 709 - RNA, 19 nt, Artificial Sequence
  Description of Artificial Sequence:  Target Sequence/siNA sense region
uugauuagaagccaagaca

SEQ ID NO: 710 - RNA, 19 nt, Artificial Sequence
  Description of Artificial Sequence:  Target Sequence/siNA sense region
aguggcagcaaaggaagac

SEQ ID NO: 711 - RNA, 19 nt, Artificial Sequence
  Description of Artificial Sequence:  Target Sequence/siNA sense region
cuuggcccaggaaaaaccu

SEQ ID NO: 712 - RNA, 19 nt, Artificial Sequence
  Description of Artificial Sequence:  Target Sequence/siNA sense region
uguggguugugcuaauuuc

SEQ ID NO: 713 - RNA, 19 nt, Artificial Sequence
  Description of Artificial Sequence:  Target Sequence/siNA sense region
cuguccagaaaauagggug

SEQ ID NO: 714 - RNA, 19 nt, Artificial Sequence
  Description of Artificial Sequence:  Target Sequence/siNA sense region
ggacagaagcuuguggggu

SEQ ID NO: 715 - RNA, 19 nt, Artificial Sequence
  Description of Artificial Sequence:  Target Sequence/siNA sense region
ugcauggaggaauugggac

SEQ ID NO: 716 - RNA, 19 nt, Artificial Sequence
  Description of Artificial Sequence:  Target Sequence/siNA sense region
ccugguuauguuguuauuc

SEQ ID NO: 717 - RNA, 19 nt, Artificial Sequence
  Description of Artificial Sequence:  Target Sequence/siNA sense region
cucggacugugaauuuugg

SEQ ID NO: 718 - RNA, 19 nt, Artificial Sequence
  Description of Artificial Sequence:  Target Sequence/siNA sense region
gugauguaaaacagaauau

SEQ ID NO: 719 - RNA, 19 nt, Artificial Sequence
  Description of Artificial Sequence:  Target Sequence/siNA sense region
uucuguaaaccuaaugucu

SEQ ID NO: 720 - RNA, 19 nt, Artificial Sequence
  Description of Artificial Sequence:  Target Sequence/siNA sense region
uguauaaauaaugagcguu

SEQ ID NO: 721 - RNA, 19 nt, Artificial Sequence
  Description of Artificial Sequence:  Target Sequence/siNA sense region
uaacacaguaaaauauuca

SEQ ID NO: 722 - RNA, 19 nt, Artificial Sequence
  Description of Artificial Sequence:  Target Sequence/siNA sense region
aauaagaagucaaaaaaaa

SEQ ID NO: 723 - RNA, 19 nt, Artificial Sequence
  Description of Artificial Sequence:  Target Sequence/siNA sense region
aagucaaaaaaaaaaaaaa

SEQ ID NO: 724 - RNA, 19 nt, Artificial Sequence
  Description of Artificial Sequence:  siNA antisense region
cgggcuggggacgagugcg

SEQ ID NO: 725 - RNA, 19 nt, Artificial Sequence
  Description of Artificial Sequence:  siNA antisense region
cggcucgcagcucccgggc

SEQ ID NO: 726 - RNA, 19 nt, Artificial Sequence
  Description of Artificial Sequence:  siNA antisense region
ccaccauaauccagcucgc

SEQ ID NO: 727 - RNA, 19 nt, Artificial Sequence
  Description of Artificial Sequence:  siNA antisense region
cugcguuggcugcucaggc

SEQ ID NO: 728 - RNA, 19 nt, Artificial Sequence
  Description of Artificial Sequence:  siNA antisense region
ggcuccgggcuccugcggc

SEQ ID NO: 729 - RNA, 19 nt, Artificial Sequence
  Description of Artificial Sequence:  siNA antisense region
ggcgcgggcaggggcaagg

SEQ ID NO: 730 - RNA, 19 nt, Artificial Sequence
  Description of Artificial Sequence:  siNA antisense region
guccccccggcgggcggcg

SEQ ID NO: 731 - RNA, 19 nt, Artificial Sequence
  Description of Artificial Sequence:  siNA antisense region
ccgguggcggcuucccugg

SEQ ID NO: 732 - RNA, 19 nt, Artificial Sequence
  Description of Artificial Sequence:  siNA antisense region
aggggcgggcauggcgggc

SEQ ID NO: 733 - RNA, 19 nt, Artificial Sequence
  Description of Artificial Sequence:  siNA antisense region
gcucccggcggggcuggga

SEQ ID NO: 734 - RNA, 19 nt, Artificial Sequence
  Description of Artificial Sequence:  siNA antisense region
ccugggcagcgggcgcggg

SEQ ID NO: 735 - RNA, 19 nt, Artificial Sequence
  Description of Artificial Sequence:  siNA antisense region
cggcacggcggcggccagc

SEQ ID NO: 736 - RNA, 19 nt, Artificial Sequence
  Description of Artificial Sequence:  siNA antisense region
auccggagcccgcuacauc

SEQ ID NO: 737 - RNA, 19 nt, Artificial Sequence
  Description of Artificial Sequence:  siNA antisense region
agcaggggagaggcuggga

SEQ ID NO: 738 - RNA, 19 nt, Artificial Sequence
  Description of Artificial Sequence:  siNA antisense region
agauccgcagagcacggga

SEQ ID NO: 739 - RNA, 19 nt, Artificial Sequence
  Description of Artificial Sequence:  siNA antisense region
guggagagcggucagggga

SEQ ID NO: 740 - RNA, 19 nt, Artificial Sequence
  Description of Artificial Sequence:  siNA antisense region
agcccccggguccgggcug

SEQ ID NO: 741 - RNA, 19 nt, Artificial Sequence
  Description of Artificial Sequence:  siNA antisense region
ccugcagggcccugggcca

SEQ ID NO: 742 - RNA, 19 nt, Artificial Sequence
  Description of Artificial Sequence:  siNA antisense region
ggcaucaggacgccagggc

SEQ ID NO: 743 - RNA, 19 nt, Artificial Sequence
  Description of Artificial Sequence:  siNA antisense region
caggagagggagcuugggg

SEQ ID NO: 744 - RNA, 19 nt, Artificial Sequence
  Description of Artificial Sequence:  siNA antisense region
guggugcugguggcuucuc

SEQ ID NO: 745 - RNA, 19 nt, Artificial Sequence
  Description of Artificial Sequence:  siNA antisense region
gccugcccccaagucuggg

SEQ ID NO: 746 - RNA, 19 nt, Artificial Sequence
  Description of Artificial Sequence:  siNA antisense region
cccacguccgucccuggcg

SEQ ID NO: 747 - RNA, 19 nt, Artificial Sequence
  Description of Artificial Sequence:  siNA antisense region
ccucugggcucgcacuggc

SEQ ID NO: 748 - RNA, 19 nt, Artificial Sequence
  Description of Artificial Sequence:  siNA antisense region
gggccccggccuucgggcc

SEQ ID NO: 749 - RNA, 19 nt, Artificial Sequence
  Description of Artificial Sequence:  siNA antisense region
cagggcuugggccauggug

SEQ ID NO: 750 - RNA, 19 nt, Artificial Sequence
  Description of Artificial Sequence:  siNA antisense region
ccacagcaggagccagggc

SEQ ID NO: 751 - RNA, 19 nt, Artificial Sequence
  Description of Artificial Sequence:  siNA antisense region
cagcacucccgcgcccauc

SEQ ID NO: 752 - RNA, 19 nt, Artificial Sequence
  Description of Artificial Sequence:  siNA antisense region
cugggugccgugggcaggc

SEQ ID NO: 753 - RNA, 19 nt, Artificial Sequence
  Description of Artificial Sequence:  siNA antisense region
gggcagccggaugccgugc

SEQ ID NO: 754 - RNA, 19 nt, Artificial Sequence
  Description of Artificial Sequence:  siNA antisense region
ccccaggccgcugcgcagg

SEQ ID NO: 755 - RNA, 19 nt, Artificial Sequence
  Description of Artificial Sequence:  siNA antisense region
cagccccaggggggcgccc

SEQ ID NO: 756 - RNA, 19 nt, Artificial Sequence
  Description of Artificial Sequence:  siNA antisense region
ggucucccggggcagccgc

SEQ ID NO: 757 - RNA, 19 nt, Artificial Sequence
  Description of Artificial Sequence:  siNA antisense region
cuccucgggcucuucgucg

SEQ ID NO: 758 - RNA, 19 nt, Artificial Sequence
  Description of Artificial Sequence:  siNA antisense region
gcugccccuccggccgggc

SEQ ID NO: 759 - RNA, 19 nt, Artificial Sequence
  Description of Artificial Sequence:  siNA antisense region
guccaccaucuccacaaag

SEQ ID NO: 760 - RNA, 19 nt, Artificial Sequence
  Description of Artificial Sequence:  siNA antisense region
cgacuugccccucagguug

SEQ ID NO: 761 - RNA, 19 nt, Artificial Sequence
  Description of Artificial Sequence:  siNA antisense region
cacguaguagcccugcccc

SEQ ID NO: 762 - RNA, 19 nt, Artificial Sequence
  Description of Artificial Sequence:  siNA antisense region
gcugcccacggucaucucc

SEQ ID NO: 763 - RNA, 19 nt, Artificial Sequence
  Description of Artificial Sequence:  siNA antisense region
guugagcgucugcgggggg

SEQ ID NO: 764 - RNA, 19 nt, Artificial Sequence
  Description of Artificial Sequence:  siNA antisense region
gccuguauccaccaggaug

SEQ ID NO: 765 - RNA, 19 nt, Artificial Sequence
  Description of Artificial Sequence:  siNA antisense region
cacugcaaaguuacugcug

SEQ ID NO: 766 - RNA, 19 nt, Artificial Sequence
  Description of Artificial Sequence:  siNA antisense region
gggguggggggcagcaccc

SEQ ID NO: 767 - RNA, 19 nt, Artificial Sequence
  Description of Artificial Sequence:  siNA antisense region
guaguagcgaugcaggaag

SEQ ID NO: 768 - RNA, 19 nt, Artificial Sequence
  Description of Artificial Sequence:  siNA antisense region
gcuggacagcugccucugg

SEQ ID NO: 769 - RNA, 19 nt, Artificial Sequence
  Description of Artificial Sequence:  siNA antisense region
ccggaggucccgguaugug

SEQ ID NO: 770 - RNA, 19 nt, Artificial Sequence
  Description of Artificial Sequence:  siNA antisense region
gggcacauacacacccuuc

SEQ ID NO: 771 - RNA, 19 nt, Artificial Sequence
  Description of Artificial Sequence:  siNA antisense region
ccacuugcccuggguguag

SEQ ID NO: 772 - RNA, 19 nt, Artificial Sequence
  Description of Artificial Sequence:  siNA antisense region
ggugcccagcuccccuucc

SEQ ID NO: 773 - RNA, 19 nt, Artificial Sequence
  Description of Artificial Sequence:  siNA antisense region
ggggaugcuuaccaggucg

SEQ ID NO: 774 - RNA, 19 nt, Artificial Sequence
  Description of Artificial Sequence:  siNA antisense region
agugacguuggggccaugg

SEQ ID NO: 775 - RNA, 19 nt, Artificial Sequence
  Description of Artificial Sequence:  siNA antisense region
agcaauguuggcacgcaca

SEQ ID NO: 776 - RNA, 19 nt, Artificial Sequence
  Description of Artificial Sequence:  siNA antisense region
gucugauucagugauggca

SEQ ID NO: 777 - RNA, 19 nt, Artificial Sequence
  Description of Artificial Sequence:  siNA antisense region
gccguugaugaagaacuug

SEQ ID NO: 778 - RNA, 19 nt, Artificial Sequence
  Description of Artificial Sequence:  siNA antisense region
gaugccuucccaguuggag

SEQ ID NO: 779 - RNA, 19 nt, Artificial Sequence
  Description of Artificial Sequence:  siNA antisense region
agcauaggccagccccagg

SEQ ID NO: 780 - RNA, 19 nt, Artificial Sequence
  Description of Artificial Sequence:  siNA antisense region
gucaggccuggcaaucuca

SEQ ID NO: 781 - RNA, 19 nt, Artificial Sequence
  Description of Artificial Sequence:  siNA antisense region
gaaaggcuccagggagucg

SEQ ID NO: 782 - RNA, 19 nt, Artificial Sequence
  Description of Artificial Sequence:  siNA antisense region
cuuuaccagagagucaaag

SEQ ID NO: 783 - RNA, 19 nt, Artificial Sequence
  Description of Artificial Sequence:  siNA antisense region
guugggaacgugggucugc

SEQ ID NO: 784 - RNA, 19 nt, Artificial Sequence
  Description of Artificial Sequence:  siNA antisense region
aagcugcagggagaagagg

SEQ ID NO: 785 - RNA, 19 nt, Artificial Sequence
  Description of Artificial Sequence:  siNA antisense region
ggggaagccagcaccacaa

SEQ ID NO: 786 - RNA, 19 nt, Artificial Sequence
  Description of Artificial Sequence:  siNA antisense region
cacuucagacugguugagg

SEQ ID NO: 787 - RNA, 19 nt, Artificial Sequence
  Description of Artificial Sequence:  siNA antisense region
cccuccgacagaggccagc

SEQ ID NO: 788 - RNA, 19 nt, Artificial Sequence
  Description of Artificial Sequence:  siNA antisense region
accuccaaugaucaugcuc

SEQ ID NO: 789 - RNA, 19 nt, Artificial Sequence
  Description of Artificial Sequence:  siNA antisense region
guacagcgaguggucgaua

SEQ ID NO: 790 - RNA, 19 nt, Artificial Sequence
  Description of Artificial Sequence:  siNA antisense region
auaccagagacugccugug

SEQ ID NO: 791 - RNA, 19 nt, Artificial Sequence
  Description of Artificial Sequence:  siNA antisense region
cucccgccggaugggugua

SEQ ID NO: 792 - RNA, 19 nt, Artificial Sequence
  Description of Artificial Sequence:  siNA antisense region
gaugaccucauaauaccac

SEQ ID NO: 793 - RNA, 19 nt, Artificial Sequence
  Description of Artificial Sequence:  siNA antisense region
gaucuccacccgcacaaug

SEQ ID NO: 794 - RNA, 19 nt, Artificial Sequence
  Description of Artificial Sequence:  siNA antisense region
uuucagauccuguccauug

SEQ ID NO: 795 - RNA, 19 nt, Artificial Sequence
  Description of Artificial Sequence:  siNA antisense region
guacuccuugcaguccauu

SEQ ID NO: 796 - RNA, 19 nt, Artificial Sequence
  Description of Artificial Sequence:  siNA antisense region
aaugcucuugucauaguug

SEQ ID NO: 797 - RNA, 19 nt, Artificial Sequence
  Description of Artificial Sequence:  siNA antisense region
gguggugccacuguccaca

SEQ ID NO: 798 - RNA, 19 nt, Artificial Sequence
  Description of Artificial Sequence:  siNA antisense region
cuugggcaaacgaagguug

SEQ ID NO: 799 - RNA, 19 nt, Artificial Sequence
  Description of Artificial Sequence:  siNA antisense region
ugcagcuucaaacacuuuc

SEQ ID NO: 800 - RNA, 19 nt, Artificial Sequence
  Description of Artificial Sequence:  siNA antisense region
ugccuugauggauuugacu

SEQ ID NO: 801 - RNA, 19 nt, Artificial Sequence
  Description of Artificial Sequence:  siNA antisense region
cuucuccguggaggaggcu

SEQ ID NO: 802 - RNA, 19 nt, Artificial Sequence
  Description of Artificial Sequence:  siNA antisense region
ccagaaaccaucagggaac

SEQ ID NO: 803 - RNA, 19 nt, Artificial Sequence
  Description of Artificial Sequence:  siNA antisense region
caccagcugcucuccuagc

SEQ ID NO: 804 - RNA, 19 nt, Artificial Sequence
  Description of Artificial Sequence:  siNA antisense region
ggugccugcuugccagcac

SEQ ID NO: 805 - RNA, 19 nt, Artificial Sequence
  Description of Artificial Sequence:  siNA antisense region
gaaaauguuccaaggggug

SEQ ID NO: 806 - RNA, 19 nt, Artificial Sequence
  Description of Artificial Sequence:  siNA antisense region
guagagugagaugacuggg

SEQ ID NO: 807 - RNA, 19 nt, Artificial Sequence
  Description of Artificial Sequence:  siNA antisense region
gguaaccucacccauuagg

SEQ ID NO: 808 - RNA, 19 nt, Artificial Sequence
  Description of Artificial Sequence:  siNA antisense region
gaugcggaaggacugguug

SEQ ID NO: 809 - RNA, 19 nt, Artificial Sequence
  Description of Artificial Sequence:  siNA antisense region
uugcugcggaaggauggug

SEQ ID NO: 810 - RNA, 19 nt, Artificial Sequence
  Description of Artificial Sequence:  siNA antisense region
uuccacuggccgcagguau

SEQ ID NO: 811 - RNA, 19 nt, Artificial Sequence
  Description of Artificial Sequence:  siNA antisense region
uugggacguggccacaucu

SEQ ID NO: 812 - RNA, 19 nt, Artificial Sequence
  Description of Artificial Sequence:  siNA antisense region
aaacuuguaacagucgucu

SEQ ID NO: 813 - RNA, 19 nt, Artificial Sequence
  Description of Artificial Sequence:  siNA antisense region
ggaugacugugagauggca

SEQ ID NO: 814 - RNA, 19 nt, Artificial Sequence
  Description of Artificial Sequence:  siNA antisense region
ucccauaacagugcccgug

SEQ ID NO: 815 - RNA, 19 nt, Artificial Sequence
  Description of Artificial Sequence:  siNA antisense region
gcccuccaugauaacagcu

SEQ ID NO: 816 - RNA, 19 nt, Artificial Sequence
  Description of Artificial Sequence:  siNA antisense region
aucaaagacaacguagaag

SEQ ID NO: 817 - RNA, 19 nt, Artificial Sequence
  Description of Artificial Sequence:  siNA antisense region
aauucguuuucgggcccga

SEQ ID NO: 818 - RNA, 19 nt, Artificial Sequence
  Description of Artificial Sequence:  siNA antisense region
agcgcugacagcaaagcca

SEQ ID NO: 819 - RNA, 19 nt, Artificial Sequence
  Description of Artificial Sequence:  siNA antisense region
cucaucgugcacauggcaa

SEQ ID NO: 820 - RNA, 19 nt, Artificial Sequence
  Description of Artificial Sequence:  siNA antisense region
caccgcugccguccugaac

SEQ ID NO: 821 - RNA, 19 nt, Artificial Sequence
  Description of Artificial Sequence:  siNA antisense region
ggugacaaaagggccuucc

SEQ ID NO: 822 - RNA, 19 nt, Artificial Sequence
  Description of Artificial Sequence:  siNA antisense region
acagucuuccauguccaag

SEQ ID NO: 823 - RNA, 19 nt, Artificial Sequence
  Description of Artificial Sequence:  siNA antisense region
cuguggaauguuguagcca

SEQ ID NO: 824 - RNA, 19 nt, Artificial Sequence
  Description of Artificial Sequence:  siNA antisense region
gaggguugacucaucuguc

SEQ ID NO: 825 - RNA, 19 nt, Artificial Sequence
  Description of Artificial Sequence:  siNA antisense region
gacauaggcuauggucaug

SEQ ID NO: 826 - RNA, 19 nt, Artificial Sequence
  Description of Artificial Sequence:  siNA antisense region
ggcgcagauggcagccaug

SEQ ID NO: 827 - RNA, 19 nt, Artificial Sequence
  Description of Artificial Sequence:  siNA antisense region
gaguggcagcaugaagagg

SEQ ID NO: 828 - RNA, 19 nt, Artificial Sequence
  Description of Artificial Sequence:  siNA antisense region
cugacacaccaugaggcag

SEQ ID NO: 829 - RNA, 19 nt, Artificial Sequence
  Description of Artificial Sequence:  siNA antisense region
gcagcggaggcagcgccac

SEQ ID NO: 830 - RNA, 19 nt, Artificial Sequence
  Description of Artificial Sequence:  siNA antisense region
aucaugcugcuggcgcagg

SEQ ID NO: 831 - RNA, 19 nt, Artificial Sequence
  Description of Artificial Sequence:  siNA antisense region
gaugucaucagcaaaguca

SEQ ID NO: 832 - RNA, 19 nt, Artificial Sequence
  Description of Artificial Sequence:  siNA antisense region
uccucacuucagcagggag

SEQ ID NO: 833 - RNA, 19 nt, Artificial Sequence
  Description of Artificial Sequence:  siNA antisense region
aucuucugcccaugggccu

SEQ ID NO: 834 - RNA, 19 nt, Artificial Sequence
  Description of Artificial Sequence:  siNA antisense region
ugguccaggggaaucucua

SEQ ID NO: 835 - RNA, 19 nt, Artificial Sequence
  Description of Artificial Sequence:  siNA antisense region
aagugaaccacggaggugu

SEQ ID NO: 836 - RNA, 19 nt, Artificial Sequence
  Description of Artificial Sequence:  siNA antisense region
gucuccuacuugugaccaa

SEQ ID NO: 837 - RNA, 19 nt, Artificial Sequence
  Description of Artificial Sequence:  siNA antisense region
gccacaggugccaucugug

SEQ ID NO: 838 - RNA, 19 nt, Artificial Sequence
  Description of Artificial Sequence:  siNA antisense region
ggguccugaggugcucugg

SEQ ID NO: 839 - RNA, 19 nt, Artificial Sequence
  Description of Artificial Sequence:  siNA antisense region
gcauuugguggguggggag

SEQ ID NO: 840 - RNA, 19 nt, Artificial Sequence
  Description of Artificial Sequence:  siNA antisense region
uucuccaucaaggcagagg

SEQ ID NO: 841 - RNA, 19 nt, Artificial Sequence
  Description of Artificial Sequence:  siNA antisense region
accuugccagccuuuuccu

SEQ ID NO: 842 - RNA, 19 nt, Artificial Sequence
  Description of Artificial Sequence:  siNA antisense region
guacagucccuggaaccca

SEQ ID NO: 843 - RNA, 19 nt, Artificial Sequence
  Description of Artificial Sequence:  siNA antisense region
cuuuucuguuuccuacagg

SEQ ID NO: 844 - RNA, 19 nt, Artificial Sequence
  Description of Artificial Sequence:  siNA antisense region
agagugcuucuuucuucuc

SEQ ID NO: 845 - RNA, 19 nt, Artificial Sequence
  Description of Artificial Sequence:  siNA antisense region
aagaguauucccgccagca

SEQ ID NO: 846 - RNA, 19 nt, Artificial Sequence
  Description of Artificial Sequence:  siNA antisense region
cuuaaauuugaggugacca

SEQ ID NO: 847 - RNA, 19 nt, Artificial Sequence
  Description of Artificial Sequence:  siNA antisense region
agcagcagaauuucccgac

SEQ ID NO: 848 - RNA, 19 nt, Artificial Sequence
  Description of Artificial Sequence:  siNA antisense region
uucagggcugaaguuucaa

SEQ ID NO: 849 - RNA, 19 nt, Artificial Sequence
  Description of Artificial Sequence:  siNA antisense region
aggaaugguggacaaaggu

SEQ ID NO: 850 - RNA, 19 nt, Artificial Sequence
  Description of Artificial Sequence:  siNA antisense region
uuggguuggagaauuuaaa

SEQ ID NO: 851 - RNA, 19 nt, Artificial Sequence
  Description of Artificial Sequence:  siNA antisense region
uaagaaaagaagaauacuu

SEQ ID NO: 852 - RNA, 19 nt, Artificial Sequence
  Description of Artificial Sequence:  siNA antisense region
ugccaguacuucugaaacu

SEQ ID NO: 853 - RNA, 19 nt, Artificial Sequence
  Description of Artificial Sequence:  siNA antisense region
aagguaaccugcgugugau

SEQ ID NO: 854 - RNA, 19 nt, Artificial Sequence
  Description of Artificial Sequence:  siNA antisense region
accacagggacacacgcca

SEQ ID NO: 855 - RNA, 19 nt, Artificial Sequence
  Description of Artificial Sequence:  siNA antisense region
ucucuucucugccagggua

SEQ ID NO: 856 - RNA, 19 nt, Artificial Sequence
  Description of Artificial Sequence:  siNA antisense region
gcagggaaacaagcuuggu

SEQ ID NO: 857 - RNA, 19 nt, Artificial Sequence
  Description of Artificial Sequence:  siNA antisense region
uccuacugacuuuggccag

SEQ ID NO: 858 - RNA, 19 nt, Artificial Sequence
  Description of Artificial Sequence:  siNA antisense region
agcaaacugugcauccucu

SEQ ID NO: 859 - RNA, 19 nt, Artificial Sequence
  Description of Artificial Sequence:  siNA antisense region
ccugucucuaaagcaaaua

SEQ ID NO: 860 - RNA, 19 nt, Artificial Sequence
  Description of Artificial Sequence:  siNA antisense region
aggcuuguuuauacagucc

SEQ ID NO: 861 - RNA, 19 nt, Artificial Sequence
  Description of Artificial Sequence:  siNA antisense region
aaucuuugcaccaauguua

SEQ ID NO: 862 - RNA, 19 nt, Artificial Sequence
  Description of Artificial Sequence:  siNA antisense region
uuuuuuaauucaagaggca

SEQ ID NO: 863 - RNA, 19 nt, Artificial Sequence
  Description of Artificial Sequence:  siNA antisense region
auagucaaucuaguuuuuu

SEQ ID NO: 864 - RNA, 19 nt, Artificial Sequence
  Description of Artificial Sequence:  siNA antisense region
ccgcccccauuuguauaaa

SEQ ID NO: 865 - RNA, 19 nt, Artificial Sequence
  Description of Artificial Sequence:  siNA antisense region
uccuucuccucuuuccagc

SEQ ID NO: 866 - RNA, 19 nt, Artificial Sequence
  Description of Artificial Sequence:  siNA antisense region
cugucuuuguacucccucu

SEQ ID NO: 867 - RNA, 19 nt, Artificial Sequence
  Description of Artificial Sequence:  siNA antisense region
cuuugaucccacuauuccc

SEQ ID NO: 868 - RNA, 19 nt, Artificial Sequence
  Description of Artificial Sequence:  siNA antisense region
uguuucugccuuuccuagc

SEQ ID NO: 869 - RNA, 19 nt, Artificial Sequence
  Description of Artificial Sequence:  siNA antisense region
aggacuggugagugguugu

SEQ ID NO: 870 - RNA, 19 nt, Artificial Sequence
  Description of Artificial Sequence:  siNA antisense region
gagaugaggucuaaaacua

SEQ ID NO: 871 - RNA, 19 nt, Artificial Sequence
  Description of Artificial Sequence:  siNA antisense region
agaugggaugcuaucuugg

SEQ ID NO: 872 - RNA, 19 nt, Artificial Sequence
  Description of Artificial Sequence:  siNA antisense region
aacaacacccaucuucuga

SEQ ID NO: 873 - RNA, 19 nt, Artificial Sequence
  Description of Artificial Sequence:  siNA antisense region
agaaaagaaaacauugaaa

SEQ ID NO: 874 - RNA, 19 nt, Artificial Sequence
  Description of Artificial Sequence:  siNA antisense region
uggucaggcugcaaccaca

SEQ ID NO: 875 - RNA, 19 nt, Artificial Sequence
  Description of Artificial Sequence:  siNA antisense region
cccuucccaucucacuuuu

SEQ ID NO: 876 - RNA, 19 nt, Artificial Sequence
  Description of Artificial Sequence:  siNA antisense region
gcucuuuggcuagauaagc

SEQ ID NO: 877 - RNA, 19 nt, Artificial Sequence
  Description of Artificial Sequence:  siNA antisense region
uaagagagcuaaaaaagag

SEQ ID NO: 878 - RNA, 19 nt, Artificial Sequence
  Description of Artificial Sequence:  siNA antisense region
cuuagugggcacuucauuu

SEQ ID NO: 879 - RNA, 19 nt, Artificial Sequence
  Description of Artificial Sequence:  siNA antisense region
auguguuaaguggaacuuc

SEQ ID NO: 880 - RNA, 19 nt, Artificial Sequence
  Description of Artificial Sequence:  siNA antisense region
uuaauauggcagaaauuca

SEQ ID NO: 881 - RNA, 19 nt, Artificial Sequence
  Description of Artificial Sequence:  siNA antisense region
cagauagagacaaugaaau

SEQ ID NO: 882 - RNA, 19 nt, Artificial Sequence
  Description of Artificial Sequence:  siNA antisense region
guagaauaaagggugguuc

SEQ ID NO: 883 - RNA, 19 nt, Artificial Sequence
  Description of Artificial Sequence:  siNA antisense region
cagugcugccuaucauaug

SEQ ID NO: 884 - RNA, 19 nt, Artificial Sequence
  Description of Artificial Sequence:  siNA antisense region
uaggggguuaggauauuuc

SEQ ID NO: 885 - RNA, 19 nt, Artificial Sequence
  Description of Artificial Sequence:  siNA antisense region
cacagggcaccuggagcuu

SEQ ID NO: 886 - RNA, 19 nt, Artificial Sequence
  Description of Artificial Sequence:  siNA antisense region
auaguccaguugcucuccc

SEQ ID NO: 887 - RNA, 19 nt, Artificial Sequence
  Description of Artificial Sequence:  siNA antisense region
acagagcccagcccugcua

SEQ ID NO: 888 - RNA, 19 nt, Artificial Sequence
  Description of Artificial Sequence:  siNA antisense region
gagccuaugaccaggaaga

SEQ ID NO: 889 - RNA, 19 nt, Artificial Sequence
  Description of Artificial Sequence:  siNA antisense region
agauuugggggaaagagug

SEQ ID NO: 890 - RNA, 19 nt, Artificial Sequence
  Description of Artificial Sequence:  siNA antisense region
cugcaaagcuccagaggaa

SEQ ID NO: 891 - RNA, 19 nt, Artificial Sequence
  Description of Artificial Sequence:  siNA antisense region
uuccuuuuagcaccuuggc

SEQ ID NO: 892 - RNA, 19 nt, Artificial Sequence
  Description of Artificial Sequence:  siNA antisense region
gaagaggucuccuaccuau

SEQ ID NO: 893 - RNA, 19 nt, Artificial Sequence
  Description of Artificial Sequence:  siNA antisense region
gcuuuuaaggauuagauag

SEQ ID NO: 894 - RNA, 19 nt, Artificial Sequence
  Description of Artificial Sequence:  siNA antisense region
augaauguucaacauuaug

SEQ ID NO: 895 - RNA, 19 nt, Artificial Sequence
  Description of Artificial Sequence:  siNA antisense region
uagggcaucagcuguugaa

SEQ ID NO: 896 - RNA, 19 nt, Artificial Sequence
  Description of Artificial Sequence:  siNA antisense region
aaauccaggcagggguuau

SEQ ID NO: 897 - RNA, 19 nt, Artificial Sequence
  Description of Artificial Sequence:  siNA antisense region
uuauagccuaauaggaaga

SEQ ID NO: 898 - RNA, 19 nt, Artificial Sequence
  Description of Artificial Sequence:  siNA antisense region
uaaagaucuugcuacuucu

SEQ ID NO: 899 - RNA, 19 nt, Artificial Sequence
  Description of Artificial Sequence:  siNA antisense region
aaaccacucugaauuaugu

SEQ ID NO: 900 - RNA, 19 nt, Artificial Sequence
  Description of Artificial Sequence:  siNA antisense region
gaggguaggaaggcaauga

SEQ ID NO: 901 - RNA, 19 nt, Artificial Sequence
  Description of Artificial Sequence:  siNA antisense region
aauggaggggccauuagag

SEQ ID NO: 902 - RNA, 19 nt, Artificial Sequence
  Description of Artificial Sequence:  siNA antisense region
ugaugcuuuagucaaauaa

SEQ ID NO: 903 - RNA, 19 nt, Artificial Sequence
  Description of Artificial Sequence:  siNA antisense region
aaugcuagugccacugugu

SEQ ID NO: 904 - RNA, 19 nt, Artificial Sequence
  Description of Artificial Sequence:  siNA antisense region
uucucauacucuugguaua

SEQ ID NO: 905 - RNA, 19 nt, Artificial Sequence
  Description of Artificial Sequence:  siNA antisense region
agccauaaagcacuguauu

SEQ ID NO: 906 - RNA, 19 nt, Artificial Sequence
  Description of Artificial Sequence:  siNA antisense region
ugaaggcaguaauguuaga

SEQ ID NO: 907 - RNA, 19 nt, Artificial Sequence
  Description of Artificial Sequence:  siNA antisense region
uccaggcagccuugauacu

SEQ ID NO: 908 - RNA, 19 nt, Artificial Sequence
  Description of Artificial Sequence:  siNA antisense region
ugaggcugccauccuuucu

SEQ ID NO: 909 - RNA, 19 nt, Artificial Sequence
  Description of Artificial Sequence:  siNA antisense region
gaggacauaaggaagcccu

SEQ ID NO: 910 - RNA, 19 nt, Artificial Sequence
  Description of Artificial Sequence:  siNA antisense region
caaggagcucuuguggugg

SEQ ID NO: 911 - RNA, 19 nt, Artificial Sequence
  Description of Artificial Sequence:  siNA antisense region
gaaaaagaugaccuucauc

SEQ ID NO: 912 - RNA, 19 nt, Artificial Sequence
  Description of Artificial Sequence:  siNA antisense region
gggaagaacaggauagggg

SEQ ID NO: 913 - RNA, 19 nt, Artificial Sequence
  Description of Artificial Sequence:  siNA antisense region
accauuaggagcggggagg

SEQ ID NO: 914 - RNA, 19 nt, Artificial Sequence
  Description of Artificial Sequence:  siNA antisense region
cagccuggguacccacgua

SEQ ID NO: 915 - RNA, 19 nt, Artificial Sequence
  Description of Artificial Sequence:  siNA antisense region
acuaccuagcccaagaacc

SEQ ID NO: 916 - RNA, 19 nt, Artificial Sequence
  Description of Artificial Sequence:  siNA antisense region
guaaugaacuuggucccca

SEQ ID NO: 917 - RNA, 19 nt, Artificial Sequence
  Description of Artificial Sequence:  siNA antisense region
gcuagaacugauagggagg

SEQ ID NO: 918 - RNA, 19 nt, Artificial Sequence
  Description of Artificial Sequence:  siNA antisense region
gguaccguaguuuacuaug

SEQ ID NO: 919 - RNA, 19 nt, Artificial Sequence
  Description of Artificial Sequence:  siNA antisense region
gcucuucccacuaacacug

SEQ ID NO: 920 - RNA, 19 nt, Artificial Sequence
  Description of Artificial Sequence:  siNA antisense region
guauacuaggaaaacccag

SEQ ID NO: 921 - RNA, 19 nt, Artificial Sequence
  Description of Artificial Sequence:  siNA antisense region
aggaguaggaugcaguggg

SEQ ID NO: 922 - RNA, 19 nt, Artificial Sequence
  Description of Artificial Sequence:  siNA antisense region
gcagcggguugaccaggua

SEQ ID NO: 923 - RNA, 19 nt, Artificial Sequence
  Description of Artificial Sequence:  siNA antisense region
caggucccauaccuggaag

SEQ ID NO: 924 - RNA, 19 nt, Artificial Sequence
  Description of Artificial Sequence:  siNA antisense region
agguaauuccacacuuagc

SEQ ID NO: 925 - RNA, 19 nt, Artificial Sequence
  Description of Artificial Sequence:  siNA antisense region
auuucccucucccuuauca

SEQ ID NO: 926 - RNA, 19 nt, Artificial Sequence
  Description of Artificial Sequence:  siNA antisense region
accagaggcccuccuugua

SEQ ID NO: 927 - RNA, 19 nt, Artificial Sequence
  Description of Artificial Sequence:  siNA antisense region
cuggcugaggccaggaaca

SEQ ID NO: 928 - RNA, 19 nt, Artificial Sequence
  Description of Artificial Sequence:  siNA antisense region
uuuauggcuugugggcagc

SEQ ID NO: 929 - RNA, 19 nt, Artificial Sequence
  Description of Artificial Sequence:  siNA antisense region
guauucuuguuuuauuggu

SEQ ID NO: 930 - RNA, 19 nt, Artificial Sequence
  Description of Artificial Sequence:  siNA antisense region
agauaaaaaacugacucag

SEQ ID NO: 931 - RNA, 19 nt, Artificial Sequence
  Description of Artificial Sequence:  siNA antisense region
ugggaaugaagagaaccca

SEQ ID NO: 932 - RNA, 19 nt, Artificial Sequence
  Description of Artificial Sequence:  siNA antisense region
aagcagcaccaagugcagu

SEQ ID NO: 933 - RNA, 19 nt, Artificial Sequence
  Description of Artificial Sequence:  siNA antisense region
gguguucccagucagccaa

SEQ ID NO: 934 - RNA, 19 nt, Artificial Sequence
  Description of Artificial Sequence:  siNA antisense region
cagacucuguaguuauggg

SEQ ID NO: 935 - RNA, 19 nt, Artificial Sequence
  Description of Artificial Sequence:  siNA antisense region
agucuccagucuuccuguc

SEQ ID NO: 936 - RNA, 19 nt, Artificial Sequence
  Description of Artificial Sequence:  siNA antisense region
uccgagcuagaaguggaca

SEQ ID NO: 937 - RNA, 19 nt, Artificial Sequence
  Description of Artificial Sequence:  siNA antisense region
uuuauuuacacaguaaguu

SEQ ID NO: 938 - RNA, 19 nt, Artificial Sequence
  Description of Artificial Sequence:  siNA antisense region
ugguagcaguucugaaagu

SEQ ID NO: 939 - RNA, 19 nt, Artificial Sequence
  Description of Artificial Sequence:  siNA antisense region
uguggcauuuucacuucau

SEQ ID NO: 940 - RNA, 19 nt, Artificial Sequence
  Description of Artificial Sequence:  siNA antisense region
agaaauuauaaagcaaaau

SEQ ID NO: 941 - RNA, 19 nt, Artificial Sequence
  Description of Artificial Sequence:  siNA antisense region
guuuuucccaacaugggua

SEQ ID NO: 942 - RNA, 19 nt, Artificial Sequence
  Description of Artificial Sequence:  siNA antisense region
agggcugggaaaaagccag

SEQ ID NO: 943 - RNA, 19 nt, Artificial Sequence
  Description of Artificial Sequence:  siNA antisense region
gaguuuuaugcccuggaaa

SEQ ID NO: 944 - RNA, 19 nt, Artificial Sequence
  Description of Artificial Sequence:  siNA antisense region
cuugcuaucgaagggguug

SEQ ID NO: 945 - RNA, 19 nt, Artificial Sequence
  Description of Artificial Sequence:  siNA antisense region
aauaauaggcugaugggac

SEQ ID NO: 946 - RNA, 19 nt, Artificial Sequence
  Description of Artificial Sequence:  siNA antisense region
gcaaguuuucuuuaaaaaa

SEQ ID NO: 947 - RNA, 19 nt, Artificial Sequence
  Description of Artificial Sequence:  siNA antisense region
guaaaaagaaaaacaagug

SEQ ID NO: 948 - RNA, 19 nt, Artificial Sequence
  Description of Artificial Sequence:  siNA antisense region
ggcaggaaggaaguaacug

SEQ ID NO: 949 - RNA, 19 nt, Artificial Sequence
  Description of Artificial Sequence:  siNA antisense region
uagaguuuauaauuuuggg

SEQ ID NO: 950 - RNA, 19 nt, Artificial Sequence
  Description of Artificial Sequence:  siNA antisense region
aagacuuuuuuuuacacuu

SEQ ID NO: 951 - RNA, 19 nt, Artificial Sequence
  Description of Artificial Sequence:  siNA antisense region
aagcaagaagcuguuguua

SEQ ID NO: 952 - RNA, 19 nt, Artificial Sequence
  Description of Artificial Sequence:  siNA antisense region
uauaauacauauuuuuaca

SEQ ID NO: 953 - RNA, 19 nt, Artificial Sequence
  Description of Artificial Sequence:  siNA antisense region
aauuuaaaaauacagaugu

SEQ ID NO: 954 - RNA, 19 nt, Artificial Sequence
  Description of Artificial Sequence:  siNA antisense region
gucauuuuucaggagcaga

SEQ ID NO: 955 - RNA, 19 nt, Artificial Sequence
  Description of Artificial Sequence:  siNA antisense region
ugaguggagaaugggacag

SEQ ID NO: 956 - RNA, 19 nt, Artificial Sequence
  Description of Artificial Sequence:  siNA antisense region
gaaaggccccaaaugcagu

SEQ ID NO: 957 - RNA, 19 nt, Artificial Sequence
  Description of Artificial Sequence:  siNA antisense region
agacaugcagaccaauggg

SEQ ID NO: 958 - RNA, 19 nt, Artificial Sequence
  Description of Artificial Sequence:  siNA antisense region
cuggccugcaaugauaaaa

SEQ ID NO: 959 - RNA, 19 nt, Artificial Sequence
  Description of Artificial Sequence:  siNA antisense region
cccuucucccucuguccac

SEQ ID NO: 960 - RNA, 19 nt, Artificial Sequence
  Description of Artificial Sequence:  siNA antisense region
guuggcgaccccuguucuc

SEQ ID NO: 961 - RNA, 19 nt, Artificial Sequence
  Description of Artificial Sequence:  siNA antisense region
ucagaaagcaacacaagug

SEQ ID NO: 962 - RNA, 19 nt, Artificial Sequence
  Description of Artificial Sequence:  siNA antisense region
uuucuuguucaggaucagu

SEQ ID NO: 963 - RNA, 19 nt, Artificial Sequence
  Description of Artificial Sequence:  siNA antisense region
agcgccucaguguuacucu

SEQ ID NO: 964 - RNA, 19 nt, Artificial Sequence
  Description of Artificial Sequence:  siNA antisense region
gaguugugcaugggagcga

SEQ ID NO: 965 - RNA, 19 nt, Artificial Sequence
  Description of Artificial Sequence:  siNA antisense region
gaggauaaguguuuuggag

SEQ ID NO: 966 - RNA, 19 nt, Artificial Sequence
  Description of Artificial Sequence:  siNA antisense region
gaaagcccacucuugcagg

SEQ ID NO: 967 - RNA, 19 nt, Artificial Sequence
  Description of Artificial Sequence:  siNA antisense region
uucccaguaaagacccugg

SEQ ID NO: 968 - RNA, 19 nt, Artificial Sequence
  Description of Artificial Sequence:  siNA antisense region
aggagggggcuuaacugcu

SEQ ID NO: 969 - RNA, 19 nt, Artificial Sequence
  Description of Artificial Sequence:  siNA antisense region
agaaaaaaggaagggguga

SEQ ID NO: 970 - RNA, 19 nt, Artificial Sequence
  Description of Artificial Sequence:  siNA antisense region
agccaaaggaguaaagaaa

SEQ ID NO: 971 - RNA, 19 nt, Artificial Sequence
  Description of Artificial Sequence:  siNA antisense region
uuuuccaaaauccuuugaa

SEQ ID NO: 972 - RNA, 19 nt, Artificial Sequence
  Description of Artificial Sequence:  siNA antisense region
uguaaagcauauuguuucu

SEQ ID NO: 973 - RNA, 19 nt, Artificial Sequence
  Description of Artificial Sequence:  siNA antisense region
uuagaaauugaaaaugagu

SEQ ID NO: 974 - RNA, 19 nt, Artificial Sequence
  Description of Artificial Sequence:  siNA antisense region
ucaguauccccugcaaauu

SEQ ID NO: 975 - RNA, 19 nt, Artificial Sequence
  Description of Artificial Sequence:  siNA antisense region
ggccaccugccguauuuuu

SEQ ID NO: 976 - RNA, 19 nt, Artificial Sequence
  Description of Artificial Sequence:  siNA antisense region
aacuuuacagcagccuuag

SEQ ID NO: 977 - RNA, 19 nt, Artificial Sequence
  Description of Artificial Sequence:  siNA antisense region
aagauuuccucuccccuca

SEQ ID NO: 978 - RNA, 19 nt, Artificial Sequence
  Description of Artificial Sequence:  siNA antisense region
uuuuuaucuuguaaucuua

SEQ ID NO: 979 - RNA, 19 nt, Artificial Sequence
  Description of Artificial Sequence:  siNA antisense region
uuuguuuaggggauucguu

SEQ ID NO: 980 - RNA, 19 nt, Artificial Sequence
  Description of Artificial Sequence:  siNA antisense region
accaguucuauuguucuuu

SEQ ID NO: 981 - RNA, 19 nt, Artificial Sequence
  Description of Artificial Sequence:  siNA antisense region
aagguggcaaaauggaaga

SEQ ID NO: 982 - RNA, 19 nt, Artificial Sequence
  Description of Artificial Sequence:  siNA antisense region
uagcugucaugaacaggaa

SEQ ID NO: 983 - RNA, 19 nt, Artificial Sequence
  Description of Artificial Sequence:  siNA antisense region
uuacugucuccagguuagu

SEQ ID NO: 984 - RNA, 19 nt, Artificial Sequence
  Description of Artificial Sequence:  siNA antisense region
ucuuugguuaaugaaaugu

SEQ ID NO: 985 - RNA, 19 nt, Artificial Sequence
  Description of Artificial Sequence:  siNA antisense region
aggucaggugacccacuuu

SEQ ID NO: 986 - RNA, 19 nt, Artificial Sequence
  Description of Artificial Sequence:  siNA antisense region
gaguacucagcucuucaga

SEQ ID NO: 987 - RNA, 19 nt, Artificial Sequence
  Description of Artificial Sequence:  siNA antisense region
gggugauuggaguggccug

SEQ ID NO: 988 - RNA, 19 nt, Artificial Sequence
  Description of Artificial Sequence:  siNA antisense region
ccuccuuggcaucuuguag

SEQ ID NO: 989 - RNA, 19 nt, Artificial Sequence
  Description of Artificial Sequence:  siNA antisense region
gagcuggacuuccugggac

SEQ ID NO: 990 - RNA, 19 nt, Artificial Sequence
  Description of Artificial Sequence:  siNA antisense region
gacuagcgucaguuuaagg

SEQ ID NO: 991 - RNA, 19 nt, Artificial Sequence
  Description of Artificial Sequence:  siNA antisense region
cacuugcccagguuuauug

SEQ ID NO: 992 - RNA, 19 nt, Artificial Sequence
  Description of Artificial Sequence:  siNA antisense region
uccucauuucucuugccuc

SEQ ID NO: 993 - RNA, 19 nt, Artificial Sequence
  Description of Artificial Sequence:  siNA antisense region
accucacagauggauucuu

SEQ ID NO: 994 - RNA, 19 nt, Artificial Sequence
  Description of Artificial Sequence:  siNA antisense region
cuuucauccuugccuguca

SEQ ID NO: 995 - RNA, 19 nt, Artificial Sequence
  Description of Artificial Sequence:  siNA antisense region
acucuuuuccuucuuuguc

SEQ ID NO: 996 - RNA, 19 nt, Artificial Sequence
  Description of Artificial Sequence:  siNA antisense region
cuccuuucugccuuugaua

SEQ ID NO: 997 - RNA, 19 nt, Artificial Sequence
  Description of Artificial Sequence:  siNA antisense region
cagacccaacuaaaugauc

SEQ ID NO: 998 - RNA, 19 nt, Artificial Sequence
  Description of Artificial Sequence:  siNA antisense region
agcaaagacuuuuccuuuc

SEQ ID NO: 999 - RNA, 19 nt, Artificial Sequence
  Description of Artificial Sequence:  siNA antisense region
uagcaguacaugucggaua

SEQ ID NO: 1000 - RNA, 19 nt, Artificial Sequence
  Description of Artificial Sequence:  siNA antisense region
uaaaaugcuuacagguacu

SEQ ID NO: 1001 - RNA, 19 nt, Artificial Sequence
  Description of Artificial Sequence:  siNA antisense region
uuuuuccauucugggaccu

SEQ ID NO: 1002 - RNA, 19 nt, Artificial Sequence
  Description of Artificial Sequence:  siNA antisense region
uuaccaauagcugauuuuu

SEQ ID NO: 1003 - RNA, 19 nt, Artificial Sequence
  Description of Artificial Sequence:  siNA antisense region
ggaaaggacauuauuauau

SEQ ID NO: 1004 - RNA, 19 nt, Artificial Sequence
  Description of Artificial Sequence:  siNA antisense region
uaaaaaaacugacuccagg

SEQ ID NO: 1005 - RNA, 19 nt, Artificial Sequence
  Description of Artificial Sequence:  siNA antisense region
aacuaagaguuaacuuuuu

SEQ ID NO: 1006 - RNA, 19 nt, Artificial Sequence
  Description of Artificial Sequence:  siNA antisense region
uagaauuaaacaaguaaaa

SEQ ID NO: 1007 - RNA, 19 nt, Artificial Sequence
  Description of Artificial Sequence:  siNA antisense region
cucagcucccuucucuuuu

SEQ ID NO: 1008 - RNA, 19 nt, Artificial Sequence
  Description of Artificial Sequence:  siNA antisense region
acuccuacagggaauggcc

SEQ ID NO: 1009 - RNA, 19 nt, Artificial Sequence
  Description of Artificial Sequence:  siNA antisense region
uccuauccuuuuaucuuua

SEQ ID NO: 1010 - RNA, 19 nt, Artificial Sequence
  Description of Artificial Sequence:  siNA antisense region
uuagagcuuugaaucuuuu

SEQ ID NO: 1011 - RNA, 19 nt, Artificial Sequence
  Description of Artificial Sequence:  siNA antisense region
gggaaagcugugacucuau

SEQ ID NO: 1012 - RNA, 19 nt, Artificial Sequence
  Description of Artificial Sequence:  siNA antisense region
auuuuagguuuuauaccug

SEQ ID NO: 1013 - RNA, 19 nt, Artificial Sequence
  Description of Artificial Sequence:  siNA antisense region
ugcuuauuguacuucuuaa

SEQ ID NO: 1014 - RNA, 19 nt, Artificial Sequence
  Description of Artificial Sequence:  siNA antisense region
uagaucauuuuccaccucu

SEQ ID NO: 1015 - RNA, 19 nt, Artificial Sequence
  Description of Artificial Sequence:  siNA antisense region
uggguagcuaucaggaacu

SEQ ID NO: 1016 - RNA, 19 nt, Artificial Sequence
  Description of Artificial Sequence:  siNA antisense region
uauaaaucacuugcucugu

SEQ ID NO: 1017 - RNA, 19 nt, Artificial Sequence
  Description of Artificial Sequence:  siNA antisense region
uaguuuggauuucaaauuu

SEQ ID NO: 1018 - RNA, 19 nt, Artificial Sequence
  Description of Artificial Sequence:  siNA antisense region
aaagugauauuaagaaagu

SEQ ID NO: 1019 - RNA, 19 nt, Artificial Sequence
  Description of Artificial Sequence:  siNA antisense region
cugggaaaaauggagacca

SEQ ID NO: 1020 - RNA, 19 nt, Artificial Sequence
  Description of Artificial Sequence:  siNA antisense region
ggggacauauuuccugucc

SEQ ID NO: 1021 - RNA, 19 nt, Artificial Sequence
  Description of Artificial Sequence:  siNA antisense region
gaagcaagaaaguuagggg

SEQ ID NO: 1022 - RNA, 19 nt, Artificial Sequence
  Description of Artificial Sequence:  siNA antisense region
ugcuggauuuuaauuuuug

SEQ ID NO: 1023 - RNA, 19 nt, Artificial Sequence
  Description of Artificial Sequence:  siNA antisense region
uguagaaugaucuugggau

SEQ ID NO: 1024 - RNA, 19 nt, Artificial Sequence
  Description of Artificial Sequence:  siNA antisense region
ugucugugcaaaauuacuu

SEQ ID NO: 1025 - RNA, 19 nt, Artificial Sequence
  Description of Artificial Sequence:  siNA antisense region
ggcacuggggugaggagau

SEQ ID NO: 1026 - RNA, 19 nt, Artificial Sequence
  Description of Artificial Sequence:  siNA antisense region
uugggugagcuccagacag

SEQ ID NO: 1027 - RNA, 19 nt, Artificial Sequence
  Description of Artificial Sequence:  siNA antisense region
ccaaguuguuuggugaccu

SEQ ID NO: 1028 - RNA, 19 nt, Artificial Sequence
  Description of Artificial Sequence:  siNA antisense region
aaggcaguugguucacaac

SEQ ID NO: 1029 - RNA, 19 nt, Artificial Sequence
  Description of Artificial Sequence:  siNA antisense region
ccccucccccagaagguua

SEQ ID NO: 1030 - RNA, 19 nt, Artificial Sequence
  Description of Artificial Sequence:  siNA antisense region
cuccuagucuagcuaaucc

SEQ ID NO: 1031 - RNA, 19 nt, Artificial Sequence
  Description of Artificial Sequence:  siNA antisense region
uucccauucacuucugguc

SEQ ID NO: 1032 - RNA, 19 nt, Artificial Sequence
  Description of Artificial Sequence:  siNA antisense region
uugugaaguccucacccuu

SEQ ID NO: 1033 - RNA, 19 nt, Artificial Sequence
  Description of Artificial Sequence:  siNA antisense region
agcucugacaggccaacau

SEQ ID NO: 1034 - RNA, 19 nt, Artificial Sequence
  Description of Artificial Sequence:  siNA antisense region
ugucuuggcuucuaaucaa

SEQ ID NO: 1035 - RNA, 19 nt, Artificial Sequence
  Description of Artificial Sequence:  siNA antisense region
gucuuccuuugcugccacu

SEQ ID NO: 1036 - RNA, 19 nt, Artificial Sequence
  Description of Artificial Sequence:  siNA antisense region
agguuuuuccugggccaag

SEQ ID NO: 1037 - RNA, 19 nt, Artificial Sequence
  Description of Artificial Sequence:  siNA antisense region
gaaauuagcacaacccaca

SEQ ID NO: 1038 - RNA, 19 nt, Artificial Sequence
  Description of Artificial Sequence:  siNA antisense region
cacccuauuuucuggacag

SEQ ID NO: 1039 - RNA, 19 nt, Artificial Sequence
  Description of Artificial Sequence:  siNA antisense region
accccacaagcuucugucc

SEQ ID NO: 1040 - RNA, 19 nt, Artificial Sequence
  Description of Artificial Sequence:  siNA antisense region
gucccaauuccuccaugca

SEQ ID NO: 1041 - RNA, 19 nt, Artificial Sequence
  Description of Artificial Sequence:  siNA antisense region
gaauaacaacauaaccagg

SEQ ID NO: 1042 - RNA, 19 nt, Artificial Sequence
  Description of Artificial Sequence:  siNA antisense region
ccaaaauucacaguccgag

SEQ ID NO: 1043 - RNA, 19 nt, Artificial Sequence
  Description of Artificial Sequence:  siNA antisense region
auauucuguuuuacaucac

SEQ ID NO: 1044 - RNA, 19 nt, Artificial Sequence
  Description of Artificial Sequence:  siNA antisense region
agacauuagguuuacagaa

SEQ ID NO: 1045 - RNA, 19 nt, Artificial Sequence
  Description of Artificial Sequence:  siNA antisense region
aacgcucauuauuuauaca

SEQ ID NO: 1046 - RNA, 19 nt, Artificial Sequence
  Description of Artificial Sequence:  siNA antisense region
ugaauauuuuacuguguua

SEQ ID NO: 1047 - RNA, 19 nt, Artificial Sequence
  Description of Artificial Sequence:  siNA antisense region
uuuuuuuugacuucuuauu

SEQ ID NO: 1048 - RNA, 19 nt, Artificial Sequence
  Description of Artificial Sequence:  siNA antisense region
uuuuuuuuuuuuuugacuu

SEQ ID NO: 1049 - RNA, 19 nt, Artificial Sequence
  Description of Artificial Sequence:  Target Sequence/siNA sense region
gacagaguuaccugcaccg

SEQ ID NO: 1050 - RNA, 19 nt, Artificial Sequence
  Description of Artificial Sequence:  Target Sequence/siNA sense region
guuguccuacuuccagaau

SEQ ID NO: 1051 - RNA, 19 nt, Artificial Sequence
  Description of Artificial Sequence:  Target Sequence/siNA sense region
ugcacagaugucugaggac

SEQ ID NO: 1052 - RNA, 19 nt, Artificial Sequence
  Description of Artificial Sequence:  Target Sequence/siNA sense region
caaccaccugagcaauacu

SEQ ID NO: 1053 - RNA, 19 nt, Artificial Sequence
  Description of Artificial Sequence:  Target Sequence/siNA sense region
uaaugacaauagagaacgg

SEQ ID NO: 1054 - RNA, 19 nt, Artificial Sequence
  Description of Artificial Sequence:  Target Sequence/siNA sense region
gcaggagcacaacgacaga

SEQ ID NO: 1055 - RNA, 19 nt, Artificial Sequence
  Description of Artificial Sequence:  Target Sequence/siNA sense region
acggagccuuggccacccu

SEQ ID NO: 1056 - RNA, 19 nt, Artificial Sequence
  Description of Artificial Sequence:  Target Sequence/siNA sense region
ugagccauuaucuaaugga

SEQ ID NO: 1057 - RNA, 19 nt, Artificial Sequence
  Description of Artificial Sequence:  Target Sequence/siNA sense region
acgaccccaggguaacucc

SEQ ID NO: 1058 - RNA, 19 nt, Artificial Sequence
  Description of Artificial Sequence:  Target Sequence/siNA sense region
ccggcaggugguggagcaa

SEQ ID NO: 1059 - RNA, 19 nt, Artificial Sequence
  Description of Artificial Sequence:  Target Sequence/siNA sense region
agaugaggaagaagaugag

SEQ ID NO: 1060 - RNA, 19 nt, Artificial Sequence
  Description of Artificial Sequence:  Target Sequence/siNA sense region
ggagcugacauugaaauau

SEQ ID NO: 1061 - RNA, 19 nt, Artificial Sequence
  Description of Artificial Sequence:  Target Sequence/siNA sense region
uggcgccaagcaugugauc

SEQ ID NO: 1062 - RNA, 19 nt, Artificial Sequence
  Description of Artificial Sequence:  Target Sequence/siNA sense region
caugcucuuugucccugug

SEQ ID NO: 1063 - RNA, 19 nt, Artificial Sequence
  Description of Artificial Sequence:  Target Sequence/siNA sense region
gacucucugcaugguggug

SEQ ID NO: 1064 - RNA, 19 nt, Artificial Sequence
  Description of Artificial Sequence:  Target Sequence/siNA sense region
ggucguggcuaccauuaag

SEQ ID NO: 1065 - RNA, 19 nt, Artificial Sequence
  Description of Artificial Sequence:  Target Sequence/siNA sense region
gucagucagcuuuuauacc

SEQ ID NO: 1066 - RNA, 19 nt, Artificial Sequence
  Description of Artificial Sequence:  Target Sequence/siNA sense region
ccggaaggaugggcagcua

SEQ ID NO: 1067 - RNA, 19 nt, Artificial Sequence
  Description of Artificial Sequence:  Target Sequence/siNA sense region
aaucuauaccccauucaca

SEQ ID NO: 1068 - RNA, 19 nt, Artificial Sequence
  Description of Artificial Sequence:  Target Sequence/siNA sense region
agaagauaccgagacugug

SEQ ID NO: 1069 - RNA, 19 nt, Artificial Sequence
  Description of Artificial Sequence:  Target Sequence/siNA sense region
gggccagagagcccugcac

SEQ ID NO: 1070 - RNA, 19 nt, Artificial Sequence
  Description of Artificial Sequence:  Target Sequence/siNA sense region
cucaauucugaaugcugcc

SEQ ID NO: 1071 - RNA, 19 nt, Artificial Sequence
  Description of Artificial Sequence:  Target Sequence/siNA sense region
caucaugaucagugucauu

SEQ ID NO: 1072 - RNA, 19 nt, Artificial Sequence
  Description of Artificial Sequence:  Target Sequence/siNA sense region
uguugucaugacuauccuc

SEQ ID NO: 1073 - RNA, 19 nt, Artificial Sequence
  Description of Artificial Sequence:  Target Sequence/siNA sense region
ccuggugguucuguauaaa

SEQ ID NO: 1074 - RNA, 19 nt, Artificial Sequence
  Description of Artificial Sequence:  Target Sequence/siNA sense region
auacaggugcuauaagguc

SEQ ID NO: 1075 - RNA, 19 nt, Artificial Sequence
  Description of Artificial Sequence:  Target Sequence/siNA sense region
cauccaugccuggcuuauu

SEQ ID NO: 1076 - RNA, 19 nt, Artificial Sequence
  Description of Artificial Sequence:  Target Sequence/siNA sense region
uauaucaucucuauuguug

SEQ ID NO: 1077 - RNA, 19 nt, Artificial Sequence
  Description of Artificial Sequence:  Target Sequence/siNA sense region
gcuguucuuuuuuucauuc

SEQ ID NO: 1078 - RNA, 19 nt, Artificial Sequence
  Description of Artificial Sequence:  Target Sequence/siNA sense region
cauuuacuugggggaagug

SEQ ID NO: 1079 - RNA, 19 nt, Artificial Sequence
  Description of Artificial Sequence:  Target Sequence/siNA sense region
guuuaaaaccuauaacguu

SEQ ID NO: 1080 - RNA, 19 nt, Artificial Sequence
  Description of Artificial Sequence:  Target Sequence/siNA sense region
ugcuguggacuacauuacu

SEQ ID NO: 1081 - RNA, 19 nt, Artificial Sequence
  Description of Artificial Sequence:  Target Sequence/siNA sense region
uguugcacuccugaucugg

SEQ ID NO: 1082 - RNA, 19 nt, Artificial Sequence
  Description of Artificial Sequence:  Target Sequence/siNA sense region
gaauuuuggugugguggga

SEQ ID NO: 1083 - RNA, 19 nt, Artificial Sequence
  Description of Artificial Sequence:  Target Sequence/siNA sense region
aaugauuuccauucacugg

SEQ ID NO: 1084 - RNA, 19 nt, Artificial Sequence
  Description of Artificial Sequence:  Target Sequence/siNA sense region
gaaagguccacuucgacuc

SEQ ID NO: 1085 - RNA, 19 nt, Artificial Sequence
  Description of Artificial Sequence:  Target Sequence/siNA sense region
ccagcaggcauaucucauu

SEQ ID NO: 1086 - RNA, 19 nt, Artificial Sequence
  Description of Artificial Sequence:  Target Sequence/siNA sense region
uaugauuagugcccucaug

SEQ ID NO: 1087 - RNA, 19 nt, Artificial Sequence
  Description of Artificial Sequence:  Target Sequence/siNA sense region
ggcccugguguuuaucaag

SEQ ID NO: 1088 - RNA, 19 nt, Artificial Sequence
  Description of Artificial Sequence:  Target Sequence/siNA sense region
guaccucccugaauggacu

SEQ ID NO: 1089 - RNA, 19 nt, Artificial Sequence
  Description of Artificial Sequence:  Target Sequence/siNA sense region
ugcguggcucaucuuggcu

SEQ ID NO: 1090 - RNA, 19 nt, Artificial Sequence
  Description of Artificial Sequence:  Target Sequence/siNA sense region
ugugauuucgguauaugau

SEQ ID NO: 1091 - RNA, 19 nt, Artificial Sequence
  Description of Artificial Sequence:  Target Sequence/siNA sense region
uuuaguggcuguuuugugu

SEQ ID NO: 1092 - RNA, 19 nt, Artificial Sequence
  Description of Artificial Sequence:  Target Sequence/siNA sense region
uccgaaagguccacuucgu

SEQ ID NO: 1093 - RNA, 19 nt, Artificial Sequence
  Description of Artificial Sequence:  Target Sequence/siNA sense region
uaugcugguugaaacagcu

SEQ ID NO: 1094 - RNA, 19 nt, Artificial Sequence
  Description of Artificial Sequence:  Target Sequence/siNA sense region
ucaggagagaaaugaaacg

SEQ ID NO: 1095 - RNA, 19 nt, Artificial Sequence
  Description of Artificial Sequence:  Target Sequence/siNA sense region
gcuuuuuccagcucucauu

SEQ ID NO: 1096 - RNA, 19 nt, Artificial Sequence
  Description of Artificial Sequence:  Target Sequence/siNA sense region
uuacuccucaacaauggug

SEQ ID NO: 1097 - RNA, 19 nt, Artificial Sequence
  Description of Artificial Sequence:  Target Sequence/siNA sense region
gugguuggugaauauggca

SEQ ID NO: 1098 - RNA, 19 nt, Artificial Sequence
  Description of Artificial Sequence:  Target Sequence/siNA sense region
agaaggagacccggaagcu

SEQ ID NO: 1099 - RNA, 19 nt, Artificial Sequence
  Description of Artificial Sequence:  Target Sequence/siNA sense region
ucaaaggagaguauccaaa

SEQ ID NO: 1100 - RNA, 19 nt, Artificial Sequence
  Description of Artificial Sequence:  Target Sequence/siNA sense region
aaauuccaaguauaaugca

SEQ ID NO: 1101 - RNA, 19 nt, Artificial Sequence
  Description of Artificial Sequence:  Target Sequence/siNA sense region
agaaagagccugucugccu

SEQ ID NO: 1102 - RNA, 19 nt, Artificial Sequence
  Description of Artificial Sequence:  Target Sequence/siNA sense region
uccugcugccaucaaccug

SEQ ID NO: 1103 - RNA, 19 nt, Artificial Sequence
  Description of Artificial Sequence:  Target Sequence/siNA sense region
gcugucuauagcucccaug

SEQ ID NO: 1104 - RNA, 19 nt, Artificial Sequence
  Description of Artificial Sequence:  Target Sequence/siNA sense region
ggcacccaggcuguucaug

SEQ ID NO: 1105 - RNA, 19 nt, Artificial Sequence
  Description of Artificial Sequence:  Target Sequence/siNA sense region
gccaaagggugccugcagg

SEQ ID NO: 1106 - RNA, 19 nt, Artificial Sequence
  Description of Artificial Sequence:  Target Sequence/siNA sense region
gcccacggcacagaaaggg

SEQ ID NO: 1107 - RNA, 19 nt, Artificial Sequence
  Description of Artificial Sequence:  Target Sequence/siNA sense region
gagucacaagacacuguug

SEQ ID NO: 1108 - RNA, 19 nt, Artificial Sequence
  Description of Artificial Sequence:  Target Sequence/siNA sense region
gcagagaaugaugauggcg

SEQ ID NO: 1109 - RNA, 19 nt, Artificial Sequence
  Description of Artificial Sequence:  Target Sequence/siNA sense region
ggguucagugaggaauggg

SEQ ID NO: 1110 - RNA, 19 nt, Artificial Sequence
  Description of Artificial Sequence:  Target Sequence/siNA sense region
gaagcccagagggacaguc

SEQ ID NO: 1111 - RNA, 19 nt, Artificial Sequence
  Description of Artificial Sequence:  Target Sequence/siNA sense region
caucuagggccucaucgcu

SEQ ID NO: 1112 - RNA, 19 nt, Artificial Sequence
  Description of Artificial Sequence:  Target Sequence/siNA sense region
ucuacaccugagucacgag

SEQ ID NO: 1113 - RNA, 19 nt, Artificial Sequence
  Description of Artificial Sequence:  Target Sequence/siNA sense region
gcugcuguccaggaacuuu

SEQ ID NO: 1114 - RNA, 19 nt, Artificial Sequence
  Description of Artificial Sequence:  Target Sequence/siNA sense region
uccagcaguauccucgcug

SEQ ID NO: 1115 - RNA, 19 nt, Artificial Sequence
  Description of Artificial Sequence:  Target Sequence/siNA sense region
ggugaagacccagaggaaa

SEQ ID NO: 1116 - RNA, 19 nt, Artificial Sequence
  Description of Artificial Sequence:  Target Sequence/siNA sense region
aggggaguaaaacuuggau

SEQ ID NO: 1117 - RNA, 19 nt, Artificial Sequence
  Description of Artificial Sequence:  Target Sequence/siNA sense region
uugggagauuucauuuucu

SEQ ID NO: 1118 - RNA, 19 nt, Artificial Sequence
  Description of Artificial Sequence:  Target Sequence/siNA sense region
uacaguguucugguuggua

SEQ ID NO: 1119 - RNA, 19 nt, Artificial Sequence
  Description of Artificial Sequence:  Target Sequence/siNA sense region
aaagccucagcaacagcca

SEQ ID NO: 1120 - RNA, 19 nt, Artificial Sequence
  Description of Artificial Sequence:  Target Sequence/siNA sense region
aguggagacuggaacacaa

SEQ ID NO: 1121 - RNA, 19 nt, Artificial Sequence
  Description of Artificial Sequence:  Target Sequence/siNA sense region
accauagccuguuucguag

SEQ ID NO: 1122 - RNA, 19 nt, Artificial Sequence
  Description of Artificial Sequence:  Target Sequence/siNA sense region
gccauauuaauugguuugu

SEQ ID NO: 1123 - RNA, 19 nt, Artificial Sequence
  Description of Artificial Sequence:  Target Sequence/siNA sense region
ugccuuacauuauuacucc

SEQ ID NO: 1124 - RNA, 19 nt, Artificial Sequence
  Description of Artificial Sequence:  Target Sequence/siNA sense region
cuugccauuuucaagaaag

SEQ ID NO: 1125 - RNA, 19 nt, Artificial Sequence
  Description of Artificial Sequence:  Target Sequence/siNA sense region
gcauugccagcucuuccaa

SEQ ID NO: 1126 - RNA, 19 nt, Artificial Sequence
  Description of Artificial Sequence:  Target Sequence/siNA sense region
aucuccaucaccuuugggc

SEQ ID NO: 1127 - RNA, 19 nt, Artificial Sequence
  Description of Artificial Sequence:  Target Sequence/siNA sense region
cuuguuuucuacuuugcca

SEQ ID NO: 1128 - RNA, 19 nt, Artificial Sequence
  Description of Artificial Sequence:  Target Sequence/siNA sense region
acagauuaucuuguacagc

SEQ ID NO: 1129 - RNA, 19 nt, Artificial Sequence
  Description of Artificial Sequence:  Target Sequence/siNA sense region
ccuuuuauggaccaauuag

SEQ ID NO: 1130 - RNA, 19 nt, Artificial Sequence
  Description of Artificial Sequence:  Target Sequence/siNA sense region
gcauuccaucaauuuuaua

SEQ ID NO: 1131 - RNA, 19 nt, Artificial Sequence
  Description of Artificial Sequence:  Target Sequence/siNA sense region
uuccaucaauuuuauaucu

SEQ ID NO: 1132 - RNA, 19 nt, Artificial Sequence
  Description of Artificial Sequence:  siNA antisense region
cggugcagguaacucuguc

SEQ ID NO: 1133 - RNA, 19 nt, Artificial Sequence
  Description of Artificial Sequence:  siNA antisense region
auucuggaaguaggacaac

SEQ ID NO: 1134 - RNA, 19 nt, Artificial Sequence
  Description of Artificial Sequence:  siNA antisense region
guccucagacaucugugca

SEQ ID NO: 1135 - RNA, 19 nt, Artificial Sequence
  Description of Artificial Sequence:  siNA antisense region
aguauugcucaggugguug

SEQ ID NO: 1136 - RNA, 19 nt, Artificial Sequence
  Description of Artificial Sequence:  siNA antisense region
ccguucucuauugucauua

SEQ ID NO: 1137 - RNA, 19 nt, Artificial Sequence
  Description of Artificial Sequence:  siNA antisense region
ucugucguugugcuccugc

SEQ ID NO: 1138 - RNA, 19 nt, Artificial Sequence
  Description of Artificial Sequence:  siNA antisense region
aggguggccaaggcuccgu

SEQ ID NO: 1139 - RNA, 19 nt, Artificial Sequence
  Description of Artificial Sequence:  siNA antisense region
uccauuagauaauggcuca

SEQ ID NO: 1140 - RNA, 19 nt, Artificial Sequence
  Description of Artificial Sequence:  siNA antisense region
ggaguuacccuggggucgu

SEQ ID NO: 1141 - RNA, 19 nt, Artificial Sequence
  Description of Artificial Sequence:  siNA antisense region
uugcuccaccaccugccgg

SEQ ID NO: 1142 - RNA, 19 nt, Artificial Sequence
  Description of Artificial Sequence:  siNA antisense region
cucaucuucuuccucaucu

SEQ ID NO: 1143 - RNA, 19 nt, Artificial Sequence
  Description of Artificial Sequence:  siNA antisense region
auauuucaaugucagcucc

SEQ ID NO: 1144 - RNA, 19 nt, Artificial Sequence
  Description of Artificial Sequence:  siNA antisense region
gaucacaugcuuggcgcca

SEQ ID NO: 1145 - RNA, 19 nt, Artificial Sequence
  Description of Artificial Sequence:  siNA antisense region
cacagggacaaagagcaug

SEQ ID NO: 1146 - RNA, 19 nt, Artificial Sequence
  Description of Artificial Sequence:  siNA antisense region
caccaccaugcagagaguc

SEQ ID NO: 1147 - RNA, 19 nt, Artificial Sequence
  Description of Artificial Sequence:  siNA antisense region
cuuaaugguagccacgacc

SEQ ID NO: 1148 - RNA, 19 nt, Artificial Sequence
  Description of Artificial Sequence:  siNA antisense region
gguauaaaagcugacugac

SEQ ID NO: 1149 - RNA, 19 nt, Artificial Sequence
  Description of Artificial Sequence:  siNA antisense region
uagcugcccauccuuccgg

SEQ ID NO: 1150 - RNA, 19 nt, Artificial Sequence
  Description of Artificial Sequence:  siNA antisense region
ugugaaugggguauagauu

SEQ ID NO: 1151 - RNA, 19 nt, Artificial Sequence
  Description of Artificial Sequence:  siNA antisense region
cacagucucgguaucuucu

SEQ ID NO: 1152 - RNA, 19 nt, Artificial Sequence
  Description of Artificial Sequence:  siNA antisense region
gugcagggcucucuggccc

SEQ ID NO: 1153 - RNA, 19 nt, Artificial Sequence
  Description of Artificial Sequence:  siNA antisense region
ggcagcauucagaauugag

SEQ ID NO: 1154 - RNA, 19 nt, Artificial Sequence
  Description of Artificial Sequence:  siNA antisense region
aaugacacugaucaugaug

SEQ ID NO: 1155 - RNA, 19 nt, Artificial Sequence
  Description of Artificial Sequence:  siNA antisense region
gaggauagucaugacaaca

SEQ ID NO: 1156 - RNA, 19 nt, Artificial Sequence
  Description of Artificial Sequence:  siNA antisense region
uuuauacagaaccaccagg

SEQ ID NO: 1157 - RNA, 19 nt, Artificial Sequence
  Description of Artificial Sequence:  siNA antisense region
gaccuuauagcaccuguau

SEQ ID NO: 1158 - RNA, 19 nt, Artificial Sequence
  Description of Artificial Sequence:  siNA antisense region
aauaagccaggcauggaug

SEQ ID NO: 1159 - RNA, 19 nt, Artificial Sequence
  Description of Artificial Sequence:  siNA antisense region
caacaauagagaugauaua

SEQ ID NO: 1160 - RNA, 19 nt, Artificial Sequence
  Description of Artificial Sequence:  siNA antisense region
gaaugaaaaaaagaacagc

SEQ ID NO: 1161 - RNA, 19 nt, Artificial Sequence
  Description of Artificial Sequence:  siNA antisense region
cacuucccccaaguaaaug

SEQ ID NO: 1162 - RNA, 19 nt, Artificial Sequence
  Description of Artificial Sequence:  siNA antisense region
aacguuauagguuuuaaac

SEQ ID NO: 1163 - RNA, 19 nt, Artificial Sequence
  Description of Artificial Sequence:  siNA antisense region
aguaauguaguccacagca

SEQ ID NO: 1164 - RNA, 19 nt, Artificial Sequence
  Description of Artificial Sequence:  siNA antisense region
ccagaucaggagugcaaca

SEQ ID NO: 1165 - RNA, 19 nt, Artificial Sequence
  Description of Artificial Sequence:  siNA antisense region
ucccaccacaccaaaauuc

SEQ ID NO: 1166 - RNA, 19 nt, Artificial Sequence
  Description of Artificial Sequence:  siNA antisense region
ccagugaauggaaaucauu

SEQ ID NO: 1167 - RNA, 19 nt, Artificial Sequence
  Description of Artificial Sequence:  siNA antisense region
gagucgaaguggaccuuuc

SEQ ID NO: 1168 - RNA, 19 nt, Artificial Sequence
  Description of Artificial Sequence:  siNA antisense region
aaugagauaugccugcugg

SEQ ID NO: 1169 - RNA, 19 nt, Artificial Sequence
  Description of Artificial Sequence:  siNA antisense region
caugagggcacuaaucaua

SEQ ID NO: 1170 - RNA, 19 nt, Artificial Sequence
  Description of Artificial Sequence:  siNA antisense region
cuugauaaacaccagggcc

SEQ ID NO: 1171 - RNA, 19 nt, Artificial Sequence
  Description of Artificial Sequence:  siNA antisense region
aguccauucagggagguac

SEQ ID NO: 1172 - RNA, 19 nt, Artificial Sequence
  Description of Artificial Sequence:  siNA antisense region
agccaagaugagccacgca

SEQ ID NO: 1173 - RNA, 19 nt, Artificial Sequence
  Description of Artificial Sequence:  siNA antisense region
aucauauaccgaaaucaca

SEQ ID NO: 1174 - RNA, 19 nt, Artificial Sequence
  Description of Artificial Sequence:  siNA antisense region
acacaaaacagccacuaaa

SEQ ID NO: 1175 - RNA, 19 nt, Artificial Sequence
  Description of Artificial Sequence:  siNA antisense region
acgaaguggaccuuucgga

SEQ ID NO: 1176 - RNA, 19 nt, Artificial Sequence
  Description of Artificial Sequence:  siNA antisense region
agcuguuucaaccagcaua

SEQ ID NO: 1177 - RNA, 19 nt, Artificial Sequence
  Description of Artificial Sequence:  siNA antisense region
cguuucauuucucuccuga

SEQ ID NO: 1178 - RNA, 19 nt, Artificial Sequence
  Description of Artificial Sequence:  siNA antisense region
aaugagagcuggaaaaagc

SEQ ID NO: 1179 - RNA, 19 nt, Artificial Sequence
  Description of Artificial Sequence:  siNA antisense region
caccauuguugaggaguaa

SEQ ID NO: 1180 - RNA, 19 nt, Artificial Sequence
  Description of Artificial Sequence:  siNA antisense region
ugccauauucaccaaccac

SEQ ID NO: 1181 - RNA, 19 nt, Artificial Sequence
  Description of Artificial Sequence:  siNA antisense region
agcuuccgggucuccuucu

SEQ ID NO: 1182 - RNA, 19 nt, Artificial Sequence
  Description of Artificial Sequence:  siNA antisense region
uuuggauacucuccuuuga

SEQ ID NO: 1183 - RNA, 19 nt, Artificial Sequence
  Description of Artificial Sequence:  siNA antisense region
ugcauuauacuuggaauuu

SEQ ID NO: 1184 - RNA, 19 nt, Artificial Sequence
  Description of Artificial Sequence:  siNA antisense region
aggcagacaggcucuuucu

SEQ ID NO: 1185 - RNA, 19 nt, Artificial Sequence
  Description of Artificial Sequence:  siNA antisense region
cagguugauggcagcagga

SEQ ID NO: 1186 - RNA, 19 nt, Artificial Sequence
  Description of Artificial Sequence:  siNA antisense region
caugggagcuauagacagc

SEQ ID NO: 1187 - RNA, 19 nt, Artificial Sequence
  Description of Artificial Sequence:  siNA antisense region
caugaacagccugggugcc

SEQ ID NO: 1188 - RNA, 19 nt, Artificial Sequence
  Description of Artificial Sequence:  siNA antisense region
ccugcaggcacccuuuggc

SEQ ID NO: 1189 - RNA, 19 nt, Artificial Sequence
  Description of Artificial Sequence:  siNA antisense region
cccuuucugugccgugggc

SEQ ID NO: 1190 - RNA, 19 nt, Artificial Sequence
  Description of Artificial Sequence:  siNA antisense region
caacagugucuugugacuc

SEQ ID NO: 1191 - RNA, 19 nt, Artificial Sequence
  Description of Artificial Sequence:  siNA antisense region
cgccaucaucauucucugc

SEQ ID NO: 1192 - RNA, 19 nt, Artificial Sequence
  Description of Artificial Sequence:  siNA antisense region
cccauuccucacugaaccc

SEQ ID NO: 1193 - RNA, 19 nt, Artificial Sequence
  Description of Artificial Sequence:  siNA antisense region
gacugucccucugggcuuc

SEQ ID NO: 1194 - RNA, 19 nt, Artificial Sequence
  Description of Artificial Sequence:  siNA antisense region
agcgaugaggcccuagaug

SEQ ID NO: 1195 - RNA, 19 nt, Artificial Sequence
  Description of Artificial Sequence:  siNA antisense region
cucgugacucagguguaga

SEQ ID NO: 1196 - RNA, 19 nt, Artificial Sequence
  Description of Artificial Sequence:  siNA antisense region
aaaguuccuggacagcagc

SEQ ID NO: 1197 - RNA, 19 nt, Artificial Sequence
  Description of Artificial Sequence:  siNA antisense region
cagcgaggauacugcugga

SEQ ID NO: 1198 - RNA, 19 nt, Artificial Sequence
  Description of Artificial Sequence:  siNA antisense region
uuuccucugggucuucacc

SEQ ID NO: 1199 - RNA, 19 nt, Artificial Sequence
  Description of Artificial Sequence:  siNA antisense region
auccaaguuuuacuccccu

SEQ ID NO: 1200 - RNA, 19 nt, Artificial Sequence
  Description of Artificial Sequence:  siNA antisense region
agaaaaugaaaucucccaa

SEQ ID NO: 1201 - RNA, 19 nt, Artificial Sequence
  Description of Artificial Sequence:  siNA antisense region
uaccaaccagaacacugua

SEQ ID NO: 1202 - RNA, 19 nt, Artificial Sequence
  Description of Artificial Sequence:  siNA antisense region
uggcuguugcugaggcuuu

SEQ ID NO: 1203 - RNA, 19 nt, Artificial Sequence
  Description of Artificial Sequence:  siNA antisense region
uuguguuccagucuccacu

SEQ ID NO: 1204 - RNA, 19 nt, Artificial Sequence
  Description of Artificial Sequence:  siNA antisense region
cuacgaaacaggcuauggu

SEQ ID NO: 1205 - RNA, 19 nt, Artificial Sequence
  Description of Artificial Sequence:  siNA antisense region
acaaaccaauuaauauggc

SEQ ID NO: 1206 - RNA, 19 nt, Artificial Sequence
  Description of Artificial Sequence:  siNA antisense region
ggaguaauaauguaaggca

SEQ ID NO: 1207 - RNA, 19 nt, Artificial Sequence
  Description of Artificial Sequence:  siNA antisense region
cuuucuugaaaauggcaag

SEQ ID NO: 1208 - RNA, 19 nt, Artificial Sequence
  Description of Artificial Sequence:  siNA antisense region
uuggaagagcuggcaaugc

SEQ ID NO: 1209 - RNA, 19 nt, Artificial Sequence
  Description of Artificial Sequence:  siNA antisense region
gcccaaaggugauggagau

SEQ ID NO: 1210 - RNA, 19 nt, Artificial Sequence
  Description of Artificial Sequence:  siNA antisense region
uggcaaaguagaaaacaag

SEQ ID NO: 1211 - RNA, 19 nt, Artificial Sequence
  Description of Artificial Sequence:  siNA antisense region
gcuguacaagauaaucugu

SEQ ID NO: 1212 - RNA, 19 nt, Artificial Sequence
  Description of Artificial Sequence:  siNA antisense region
cuaauugguccauaaaagg

SEQ ID NO: 1213 - RNA, 19 nt, Artificial Sequence
  Description of Artificial Sequence:  siNA antisense region
uauaaaauugauggaaugc

SEQ ID NO: 1214 - RNA, 19 nt, Artificial Sequence
  Description of Artificial Sequence:  siNA antisense region
agauauaaaauugauggaa

SEQ ID NO: 1215 - RNA, 19 nt, Artificial Sequence
  Description of Artificial Sequence:  Target Sequence/siNA sense region
agcggcggcggagcaggca

SEQ ID NO: 1216 - RNA, 19 nt, Artificial Sequence
  Description of Artificial Sequence:  Target Sequence/siNA sense region
auuuccagcagugaggaga

SEQ ID NO: 1217 - RNA, 19 nt, Artificial Sequence
  Description of Artificial Sequence:  Target Sequence/siNA sense region
acagccagaagcaagcuau

SEQ ID NO: 1218 - RNA, 19 nt, Artificial Sequence
  Description of Artificial Sequence:  Target Sequence/siNA sense region
uuggagcugaaggaaccug

SEQ ID NO: 1219 - RNA, 19 nt, Artificial Sequence
  Description of Artificial Sequence:  Target Sequence/siNA sense region
gagacagaagcuagucccc

SEQ ID NO: 1220 - RNA, 19 nt, Artificial Sequence
  Description of Artificial Sequence:  Target Sequence/siNA sense region
cccucugaauuuuacugau

SEQ ID NO: 1221 - RNA, 19 nt, Artificial Sequence
  Description of Artificial Sequence:  Target Sequence/siNA sense region
ugaagaaacugaggccaca

SEQ ID NO: 1222 - RNA, 19 nt, Artificial Sequence
  Description of Artificial Sequence:  Target Sequence/siNA sense region
agagcuaaagugacuuuuc

SEQ ID NO: 1223 - RNA, 19 nt, Artificial Sequence
  Description of Artificial Sequence:  Target Sequence/siNA sense region
cccaaggucgcccagcgag

SEQ ID NO: 1224 - RNA, 19 nt, Artificial Sequence
  Description of Artificial Sequence:  Target Sequence/siNA sense region
ggacgugggacuucucaga

SEQ ID NO: 1225 - RNA, 19 nt, Artificial Sequence
  Description of Artificial Sequence:  Target Sequence/siNA sense region
acgucaggagagugaugug

SEQ ID NO: 1226 - RNA, 19 nt, Artificial Sequence
  Description of Artificial Sequence:  Target Sequence/siNA sense region
gagggagcugugugaccau

SEQ ID NO: 1227 - RNA, 19 nt, Artificial Sequence
  Description of Artificial Sequence:  Target Sequence/siNA sense region
uagaaagugacguguuaaa

SEQ ID NO: 1228 - RNA, 19 nt, Artificial Sequence
  Description of Artificial Sequence:  Target Sequence/siNA sense region
aaaccagcgcugcccucuu

SEQ ID NO: 1229 - RNA, 19 nt, Artificial Sequence
  Description of Artificial Sequence:  Target Sequence/siNA sense region
uugaaagccagggagcauc

SEQ ID NO: 1230 - RNA, 19 nt, Artificial Sequence
  Description of Artificial Sequence:  Target Sequence/siNA sense region
cauucauuuagccugcuga

SEQ ID NO: 1231 - RNA, 19 nt, Artificial Sequence
  Description of Artificial Sequence:  Target Sequence/siNA sense region
agaagaagaaaccaagugu

SEQ ID NO: 1232 - RNA, 19 nt, Artificial Sequence
  Description of Artificial Sequence:  Target Sequence/siNA sense region
uccgggauucagaccucuc

SEQ ID NO: 1233 - RNA, 19 nt, Artificial Sequence
  Description of Artificial Sequence:  Target Sequence/siNA sense region
cugcggccccaaguguucg

SEQ ID NO: 1234 - RNA, 19 nt, Artificial Sequence
  Description of Artificial Sequence:  Target Sequence/siNA sense region
guggugcuuccagaggcag

SEQ ID NO: 1235 - RNA, 19 nt, Artificial Sequence
  Description of Artificial Sequence:  Target Sequence/siNA sense region
gggcuaugcucacauucau

SEQ ID NO: 1236 - RNA, 19 nt, Artificial Sequence
  Description of Artificial Sequence:  Target Sequence/siNA sense region
uggccucugacagcgagga

SEQ ID NO: 1237 - RNA, 19 nt, Artificial Sequence
  Description of Artificial Sequence:  Target Sequence/siNA sense region
aagaagugugugaugagcg

SEQ ID NO: 1238 - RNA, 19 nt, Artificial Sequence
  Description of Artificial Sequence:  Target Sequence/siNA sense region
ggacgucccuaaugucggc

SEQ ID NO: 1239 - RNA, 19 nt, Artificial Sequence
  Description of Artificial Sequence:  Target Sequence/siNA sense region
ccgagagccccacgccgcg

SEQ ID NO: 1240 - RNA, 19 nt, Artificial Sequence
  Description of Artificial Sequence:  Target Sequence/siNA sense region
gcuccugccaggagggcag

SEQ ID NO: 1241 - RNA, 19 nt, Artificial Sequence
  Description of Artificial Sequence:  Target Sequence/siNA sense region
ggcagggcccagaggaugg

SEQ ID NO: 1242 - RNA, 19 nt, Artificial Sequence
  Description of Artificial Sequence:  Target Sequence/siNA sense region
gagagaacacugcccagug

SEQ ID NO: 1243 - RNA, 19 nt, Artificial Sequence
  Description of Artificial Sequence:  Target Sequence/siNA sense region
ggagaagccaggagaacga

SEQ ID NO: 1244 - RNA, 19 nt, Artificial Sequence
  Description of Artificial Sequence:  Target Sequence/siNA sense region
aggaggacggugaggagga

SEQ ID NO: 1245 - RNA, 19 nt, Artificial Sequence
  Description of Artificial Sequence:  Target Sequence/siNA sense region
acccugaccgcuaugucug

SEQ ID NO: 1246 - RNA, 19 nt, Artificial Sequence
  Description of Artificial Sequence:  Target Sequence/siNA sense region
guagugggguucccgggcg

SEQ ID NO: 1247 - RNA, 19 nt, Artificial Sequence
  Description of Artificial Sequence:  Target Sequence/siNA sense region
ggccgccaggccuggagga

SEQ ID NO: 1248 - RNA, 19 nt, Artificial Sequence
  Description of Artificial Sequence:  Target Sequence/siNA sense region
aagagcugacccucaaaua

SEQ ID NO: 1249 - RNA, 19 nt, Artificial Sequence
  Description of Artificial Sequence:  Target Sequence/siNA sense region
acggagcgaagcacgugau

SEQ ID NO: 1250 - RNA, 19 nt, Artificial Sequence
  Description of Artificial Sequence:  Target Sequence/siNA sense region
ucaugcuguuugugccugu

SEQ ID NO: 1251 - RNA, 19 nt, Artificial Sequence
  Description of Artificial Sequence:  Target Sequence/siNA sense region
ucacucugugcaugaucgu

SEQ ID NO: 1252 - RNA, 19 nt, Artificial Sequence
  Description of Artificial Sequence:  Target Sequence/siNA sense region
uggugguagccaccaucaa

SEQ ID NO: 1253 - RNA, 19 nt, Artificial Sequence
  Description of Artificial Sequence:  Target Sequence/siNA sense region
agucugugcgcuucuacac

SEQ ID NO: 1254 - RNA, 19 nt, Artificial Sequence
  Description of Artificial Sequence:  Target Sequence/siNA sense region
cagagaagaauggacagcu

SEQ ID NO: 1255 - RNA, 19 nt, Artificial Sequence
  Description of Artificial Sequence:  Target Sequence/siNA sense region
ucaucuacacgacauucac

SEQ ID NO: 1256 - RNA, 19 nt, Artificial Sequence
  Description of Artificial Sequence:  Target Sequence/siNA sense region
cugaggacacacccucggu

SEQ ID NO: 1257 - RNA, 19 nt, Artificial Sequence
  Description of Artificial Sequence:  Target Sequence/siNA sense region
ugggccagcgccuccucaa

SEQ ID NO: 1258 - RNA, 19 nt, Artificial Sequence
  Description of Artificial Sequence:  Target Sequence/siNA sense region
acuccgugcugaacacccu

SEQ ID NO: 1259 - RNA, 19 nt, Artificial Sequence
  Description of Artificial Sequence:  Target Sequence/siNA sense region
ucaucaugaucagcgucau

SEQ ID NO: 1260 - RNA, 19 nt, Artificial Sequence
  Description of Artificial Sequence:  Target Sequence/siNA sense region
ucgugguuaugaccaucuu

SEQ ID NO: 1261 - RNA, 19 nt, Artificial Sequence
  Description of Artificial Sequence:  Target Sequence/siNA sense region
ucuugguggugcucuacaa

SEQ ID NO: 1262 - RNA, 19 nt, Artificial Sequence
  Description of Artificial Sequence:  Target Sequence/siNA sense region
aguaccgcugcuacaaguu

SEQ ID NO: 1263 - RNA, 19 nt, Artificial Sequence
  Description of Artificial Sequence:  Target Sequence/siNA sense region
ucauccauggcugguugau

SEQ ID NO: 1264 - RNA, 19 nt, Artificial Sequence
  Description of Artificial Sequence:  Target Sequence/siNA sense region
ucaugucuucacugaugcu

SEQ ID NO: 1265 - RNA, 19 nt, Artificial Sequence
  Description of Artificial Sequence:  Target Sequence/siNA sense region
ugcuguuccucuucaccua

SEQ ID NO: 1266 - RNA, 19 nt, Artificial Sequence
  Description of Artificial Sequence:  Target Sequence/siNA sense region
auaucuaccuuggggaagu

SEQ ID NO: 1267 - RNA, 19 nt, Artificial Sequence
  Description of Artificial Sequence:  Target Sequence/siNA sense region
ugcucaagaccuacaaugu

SEQ ID NO: 1268 - RNA, 19 nt, Artificial Sequence
  Description of Artificial Sequence:  Target Sequence/siNA sense region
uggccauggacuaccccac

SEQ ID NO: 1269 - RNA, 19 nt, Artificial Sequence
  Description of Artificial Sequence:  Target Sequence/siNA sense region
cccucuugcugacugucug

SEQ ID NO: 1270 - RNA, 19 nt, Artificial Sequence
  Description of Artificial Sequence:  Target Sequence/siNA sense region
ggaacuucggggcaguggg

SEQ ID NO: 1271 - RNA, 19 nt, Artificial Sequence
  Description of Artificial Sequence:  Target Sequence/siNA sense region
gcauggugugcauccacug

SEQ ID NO: 1272 - RNA, 19 nt, Artificial Sequence
  Description of Artificial Sequence:  Target Sequence/siNA sense region
ggaagggcccucuggugcu

SEQ ID NO: 1273 - RNA, 19 nt, Artificial Sequence
  Description of Artificial Sequence:  Target Sequence/siNA sense region
ugcagcaggccuaccucau

SEQ ID NO: 1274 - RNA, 19 nt, Artificial Sequence
  Description of Artificial Sequence:  Target Sequence/siNA sense region
ucaugaucagugcgcucau

SEQ ID NO: 1275 - RNA, 19 nt, Artificial Sequence
  Description of Artificial Sequence:  Target Sequence/siNA sense region
uggcccuaguguucaucaa

SEQ ID NO: 1276 - RNA, 19 nt, Artificial Sequence
  Description of Artificial Sequence:  Target Sequence/siNA sense region
aguaccucccagagugguc

SEQ ID NO: 1277 - RNA, 19 nt, Artificial Sequence
  Description of Artificial Sequence:  Target Sequence/siNA sense region
ccgcgugggucauccuggg

SEQ ID NO: 1278 - RNA, 19 nt, Artificial Sequence
  Description of Artificial Sequence:  Target Sequence/siNA sense region
gcgccaucucuguguauga

SEQ ID NO: 1279 - RNA, 19 nt, Artificial Sequence
  Description of Artificial Sequence:  Target Sequence/siNA sense region
aucucguggcugugcugug

SEQ ID NO: 1280 - RNA, 19 nt, Artificial Sequence
  Description of Artificial Sequence:  Target Sequence/siNA sense region
gucccaaagggccucugag

SEQ ID NO: 1281 - RNA, 19 nt, Artificial Sequence
  Description of Artificial Sequence:  Target Sequence/siNA sense region
gaaugcugguagaaacugc

SEQ ID NO: 1282 - RNA, 19 nt, Artificial Sequence
  Description of Artificial Sequence:  Target Sequence/siNA sense region
cccaggagagaaaugagcc

SEQ ID NO: 1283 - RNA, 19 nt, Artificial Sequence
  Description of Artificial Sequence:  Target Sequence/siNA sense region
ccauauucccugcccugau

SEQ ID NO: 1284 - RNA, 19 nt, Artificial Sequence
  Description of Artificial Sequence:  Target Sequence/siNA sense region
uauacucaucugccauggu

SEQ ID NO: 1285 - RNA, 19 nt, Artificial Sequence
  Description of Artificial Sequence:  Target Sequence/siNA sense region
uguggacgguuggcauggc

SEQ ID NO: 1286 - RNA, 19 nt, Artificial Sequence
  Description of Artificial Sequence:  Target Sequence/siNA sense region
cgaagcuggaccccuccuc

SEQ ID NO: 1287 - RNA, 19 nt, Artificial Sequence
  Description of Artificial Sequence:  Target Sequence/siNA sense region
cucagggugcccuccagcu

SEQ ID NO: 1288 - RNA, 19 nt, Artificial Sequence
  Description of Artificial Sequence:  Target Sequence/siNA sense region
uccccuacgacccggagau

SEQ ID NO: 1289 - RNA, 19 nt, Artificial Sequence
  Description of Artificial Sequence:  Target Sequence/siNA sense region
uggaagaagacuccuauga

SEQ ID NO: 1290 - RNA, 19 nt, Artificial Sequence
  Description of Artificial Sequence:  Target Sequence/siNA sense region
acaguuuuggggagccuuc

SEQ ID NO: 1291 - RNA, 19 nt, Artificial Sequence
  Description of Artificial Sequence:  Target Sequence/siNA sense region
cauaccccgaagucuuuga

SEQ ID NO: 1292 - RNA, 19 nt, Artificial Sequence
  Description of Artificial Sequence:  Target Sequence/siNA sense region
agccucccuugacuggcua

SEQ ID NO: 1293 - RNA, 19 nt, Artificial Sequence
  Description of Artificial Sequence:  Target Sequence/siNA sense region
acccaggggaggagcugga

SEQ ID NO: 1294 - RNA, 19 nt, Artificial Sequence
  Description of Artificial Sequence:  Target Sequence/siNA sense region
aggaagaggaggaaagggg

SEQ ID NO: 1295 - RNA, 19 nt, Artificial Sequence
  Description of Artificial Sequence:  Target Sequence/siNA sense region
gcgugaagcuuggccucgg

SEQ ID NO: 1296 - RNA, 19 nt, Artificial Sequence
  Description of Artificial Sequence:  Target Sequence/siNA sense region
gggacuucaucuucuacag

SEQ ID NO: 1297 - RNA, 19 nt, Artificial Sequence
  Description of Artificial Sequence:  Target Sequence/siNA sense region
gugugcuggugggcaaggc

SEQ ID NO: 1298 - RNA, 19 nt, Artificial Sequence
  Description of Artificial Sequence:  Target Sequence/siNA sense region
cggcugccacgggcagcgg

SEQ ID NO: 1299 - RNA, 19 nt, Artificial Sequence
  Description of Artificial Sequence:  Target Sequence/siNA sense region
gggacuggaauaccacgcu

SEQ ID NO: 1300 - RNA, 19 nt, Artificial Sequence
  Description of Artificial Sequence:  Target Sequence/siNA sense region
uggccugcuucguggccau

SEQ ID NO: 1301 - RNA, 19 nt, Artificial Sequence
  Description of Artificial Sequence:  Target Sequence/siNA sense region
uccucauuggcuugugucu

SEQ ID NO: 1302 - RNA, 19 nt, Artificial Sequence
  Description of Artificial Sequence:  Target Sequence/siNA sense region
ugacccuccugcugcuugc

SEQ ID NO: 1303 - RNA, 19 nt, Artificial Sequence
  Description of Artificial Sequence:  Target Sequence/siNA sense region
cuguguucaagaaggcgcu

SEQ ID NO: 1304 - RNA, 19 nt, Artificial Sequence
  Description of Artificial Sequence:  Target Sequence/siNA sense region
ugcccgcccuccccaucuc

SEQ ID NO: 1305 - RNA, 19 nt, Artificial Sequence
  Description of Artificial Sequence:  Target Sequence/siNA sense region
ccaucacguucgggcucau

SEQ ID NO: 1306 - RNA, 19 nt, Artificial Sequence
  Description of Artificial Sequence:  Target Sequence/siNA sense region
ucuuuuacuucuccacgga

SEQ ID NO: 1307 - RNA, 19 nt, Artificial Sequence
  Description of Artificial Sequence:  Target Sequence/siNA sense region
acaaccuggugcggccguu

SEQ ID NO: 1308 - RNA, 19 nt, Artificial Sequence
  Description of Artificial Sequence:  Target Sequence/siNA sense region
ucauggacacccuggccuc

SEQ ID NO: 1309 - RNA, 19 nt, Artificial Sequence
  Description of Artificial Sequence:  Target Sequence/siNA sense region
cccaucagcucuacaucug

SEQ ID NO: 1310 - RNA, 19 nt, Artificial Sequence
  Description of Artificial Sequence:  Target Sequence/siNA sense region
gagggacauggugugccac

SEQ ID NO: 1311 - RNA, 19 nt, Artificial Sequence
  Description of Artificial Sequence:  Target Sequence/siNA sense region
caggcugcaagcugcaggg

SEQ ID NO: 1312 - RNA, 19 nt, Artificial Sequence
  Description of Artificial Sequence:  Target Sequence/siNA sense region
gaauuuucauuggaugcag

SEQ ID NO: 1313 - RNA, 19 nt, Artificial Sequence
  Description of Artificial Sequence:  Target Sequence/siNA sense region
guuguauaguuuuacacuc

SEQ ID NO: 1314 - RNA, 19 nt, Artificial Sequence
  Description of Artificial Sequence:  Target Sequence/siNA sense region
cuagugccauauauuuuua

SEQ ID NO: 1315 - RNA, 19 nt, Artificial Sequence
  Description of Artificial Sequence:  Target Sequence/siNA sense region
aagacuuuucuuuccuuaa

SEQ ID NO: 1316 - RNA, 19 nt, Artificial Sequence
  Description of Artificial Sequence:  Target Sequence/siNA sense region
aaaaauaaaguacguguuu

SEQ ID NO: 1317 - RNA, 19 nt, Artificial Sequence
  Description of Artificial Sequence:  Target Sequence/siNA sense region
uacuuggugaggaggaggc

SEQ ID NO: 1318 - RNA, 19 nt, Artificial Sequence
  Description of Artificial Sequence:  Target Sequence/siNA sense region
cagaaccagcucuuuggug

SEQ ID NO: 1319 - RNA, 19 nt, Artificial Sequence
  Description of Artificial Sequence:  Target Sequence/siNA sense region
gccagcuguuucaucacca

SEQ ID NO: 1320 - RNA, 19 nt, Artificial Sequence
  Description of Artificial Sequence:  Target Sequence/siNA sense region
agacuuuggcucccgcuuu

SEQ ID NO: 1321 - RNA, 19 nt, Artificial Sequence
  Description of Artificial Sequence:  Target Sequence/siNA sense region
uggggagcgccucgcuuca

SEQ ID NO: 1322 - RNA, 19 nt, Artificial Sequence
  Description of Artificial Sequence:  Target Sequence/siNA sense region
acggacaggaagcacagca

SEQ ID NO: 1323 - RNA, 19 nt, Artificial Sequence
  Description of Artificial Sequence:  Target Sequence/siNA sense region
agguuuauccagaugaacu

SEQ ID NO: 1324 - RNA, 19 nt, Artificial Sequence
  Description of Artificial Sequence:  Target Sequence/siNA sense region
ugagaaggucagauuaggg

SEQ ID NO: 1325 - RNA, 19 nt, Artificial Sequence
  Description of Artificial Sequence:  Target Sequence/siNA sense region
gcggggagaagagcauccg

SEQ ID NO: 1326 - RNA, 19 nt, Artificial Sequence
  Description of Artificial Sequence:  Target Sequence/siNA sense region
ggcaugagggcugagaugc

SEQ ID NO: 1327 - RNA, 19 nt, Artificial Sequence
  Description of Artificial Sequence:  Target Sequence/siNA sense region
cgcaaagagugugcucggg

SEQ ID NO: 1328 - RNA, 19 nt, Artificial Sequence
  Description of Artificial Sequence:  Target Sequence/siNA sense region
gaguggccccuggcaccug

SEQ ID NO: 1329 - RNA, 19 nt, Artificial Sequence
  Description of Artificial Sequence:  Target Sequence/siNA sense region
gggugcucuggcuggagag

SEQ ID NO: 1330 - RNA, 19 nt, Artificial Sequence
  Description of Artificial Sequence:  Target Sequence/siNA sense region
ggaaaagccaguucccuac

SEQ ID NO: 1331 - RNA, 19 nt, Artificial Sequence
  Description of Artificial Sequence:  Target Sequence/siNA sense region
cgaggaguguucccaaugc

SEQ ID NO: 1332 - RNA, 19 nt, Artificial Sequence
  Description of Artificial Sequence:  Target Sequence/siNA sense region
cuuuguccaugauguccuu

SEQ ID NO: 1333 - RNA, 19 nt, Artificial Sequence
  Description of Artificial Sequence:  Target Sequence/siNA sense region
uguuauuuuauugccuuua

SEQ ID NO: 1334 - RNA, 19 nt, Artificial Sequence
  Description of Artificial Sequence:  Target Sequence/siNA sense region
agaaacugaguccuguucu

SEQ ID NO: 1335 - RNA, 19 nt, Artificial Sequence
  Description of Artificial Sequence:  Target Sequence/siNA sense region
uuguuacggcagucacacu

SEQ ID NO: 1336 - RNA, 19 nt, Artificial Sequence
  Description of Artificial Sequence:  Target Sequence/siNA sense region
ugcugggaaguggcuuaau

SEQ ID NO: 1337 - RNA, 19 nt, Artificial Sequence
  Description of Artificial Sequence:  Target Sequence/siNA sense region
uaguaauaucaauaaauag

SEQ ID NO: 1338 - RNA, 19 nt, Artificial Sequence
  Description of Artificial Sequence:  Target Sequence/siNA sense region
agaugaguccuguuagaaa

SEQ ID NO: 1339 - RNA, 19 nt, Artificial Sequence
  Description of Artificial Sequence:  siNA antisense region
ugccugcuccgccgccgcu

SEQ ID NO: 1340 - RNA, 19 nt, Artificial Sequence
  Description of Artificial Sequence:  siNA antisense region
ucuccucacugcuggaaau

SEQ ID NO: 1341 - RNA, 19 nt, Artificial Sequence
  Description of Artificial Sequence:  siNA antisense region
auagcuugcuucuggcugu

SEQ ID NO: 1342 - RNA, 19 nt, Artificial Sequence
  Description of Artificial Sequence:  siNA antisense region
cagguuccuucagcuccaa

SEQ ID NO: 1343 - RNA, 19 nt, Artificial Sequence
  Description of Artificial Sequence:  siNA antisense region
ggggacuagcuucugucuc

SEQ ID NO: 1344 - RNA, 19 nt, Artificial Sequence
  Description of Artificial Sequence:  siNA antisense region
aucaguaaaauucagaggg

SEQ ID NO: 1345 - RNA, 19 nt, Artificial Sequence
  Description of Artificial Sequence:  siNA antisense region
uguggccucaguuucuuca

SEQ ID NO: 1346 - RNA, 19 nt, Artificial Sequence
  Description of Artificial Sequence:  siNA antisense region
gaaaagucacuuuagcucu

SEQ ID NO: 1347 - RNA, 19 nt, Artificial Sequence
  Description of Artificial Sequence:  siNA antisense region
cucgcugggcgaccuuggg

SEQ ID NO: 1348 - RNA, 19 nt, Artificial Sequence
  Description of Artificial Sequence:  siNA antisense region
ucugagaagucccacgucc

SEQ ID NO: 1349 - RNA, 19 nt, Artificial Sequence
  Description of Artificial Sequence:  siNA antisense region
cacaucacucuccugacgu

SEQ ID NO: 1350 - RNA, 19 nt, Artificial Sequence
  Description of Artificial Sequence:  siNA antisense region
auggucacacagcucccuc

SEQ ID NO: 1351 - RNA, 19 nt, Artificial Sequence
  Description of Artificial Sequence:  siNA antisense region
uuuaacacgucacuuucua

SEQ ID NO: 1352 - RNA, 19 nt, Artificial Sequence
  Description of Artificial Sequence:  siNA antisense region
aagagggcagcgcugguuu

SEQ ID NO: 1353 - RNA, 19 nt, Artificial Sequence
  Description of Artificial Sequence:  siNA antisense region
gaugcucccuggcuuucaa

SEQ ID NO: 1354 - RNA, 19 nt, Artificial Sequence
  Description of Artificial Sequence:  siNA antisense region
ucagcaggcuaaaugaaug

SEQ ID NO: 1355 - RNA, 19 nt, Artificial Sequence
  Description of Artificial Sequence:  siNA antisense region
acacuugguuucuucuucu

SEQ ID NO: 1356 - RNA, 19 nt, Artificial Sequence
  Description of Artificial Sequence:  siNA antisense region
gagaggucugaaucccgga

SEQ ID NO: 1357 - RNA, 19 nt, Artificial Sequence
  Description of Artificial Sequence:  siNA antisense region
cgaacacuuggggccgcag

SEQ ID NO: 1358 - RNA, 19 nt, Artificial Sequence
  Description of Artificial Sequence:  siNA antisense region
cugccucuggaagcaccac

SEQ ID NO: 1359 - RNA, 19 nt, Artificial Sequence
  Description of Artificial Sequence:  siNA antisense region
augaaugugagcauagccc

SEQ ID NO: 1360 - RNA, 19 nt, Artificial Sequence
  Description of Artificial Sequence:  siNA antisense region
uccucgcugucagaggcca

SEQ ID NO: 1361 - RNA, 19 nt, Artificial Sequence
  Description of Artificial Sequence:  siNA antisense region
cgcucaucacacacuucuu

SEQ ID NO: 1362 - RNA, 19 nt, Artificial Sequence
  Description of Artificial Sequence:  siNA antisense region
gccgacauuagggacgucc

SEQ ID NO: 1363 - RNA, 19 nt, Artificial Sequence
  Description of Artificial Sequence:  siNA antisense region
cgcggcguggggcucucgg

SEQ ID NO: 1364 - RNA, 19 nt, Artificial Sequence
  Description of Artificial Sequence:  siNA antisense region
cugcccuccuggcaggagc

SEQ ID NO: 1365 - RNA, 19 nt, Artificial Sequence
  Description of Artificial Sequence:  siNA antisense region
ccauccucugggcccugcc

SEQ ID NO: 1366 - RNA, 19 nt, Artificial Sequence
  Description of Artificial Sequence:  siNA antisense region
cacugggcaguguucucuc

SEQ ID NO: 1367 - RNA, 19 nt, Artificial Sequence
  Description of Artificial Sequence:  siNA antisense region
ucguucuccuggcuucucc

SEQ ID NO: 1368 - RNA, 19 nt, Artificial Sequence
  Description of Artificial Sequence:  siNA antisense region
uccuccucaccguccuccu

SEQ ID NO: 1369 - RNA, 19 nt, Artificial Sequence
  Description of Artificial Sequence:  siNA antisense region
cagacauagcggucagggu

SEQ ID NO: 1370 - RNA, 19 nt, Artificial Sequence
  Description of Artificial Sequence:  siNA antisense region
cgcccgggaaccccacuac

SEQ ID NO: 1371 - RNA, 19 nt, Artificial Sequence
  Description of Artificial Sequence:  siNA antisense region
uccuccaggccuggcggcc

SEQ ID NO: 1372 - RNA, 19 nt, Artificial Sequence
  Description of Artificial Sequence:  siNA antisense region
uauuugagggucagcucuu

SEQ ID NO: 1373 - RNA, 19 nt, Artificial Sequence
  Description of Artificial Sequence:  siNA antisense region
aucacgugcuucgcuccgu

SEQ ID NO: 1374 - RNA, 19 nt, Artificial Sequence
  Description of Artificial Sequence:  siNA antisense region
acaggcacaaacagcauga

SEQ ID NO: 1375 - RNA, 19 nt, Artificial Sequence
  Description of Artificial Sequence:  siNA antisense region
acgaucaugcacagaguga

SEQ ID NO: 1376 - RNA, 19 nt, Artificial Sequence
  Description of Artificial Sequence:  siNA antisense region
uugaugguggcuaccacca

SEQ ID NO: 1377 - RNA, 19 nt, Artificial Sequence
  Description of Artificial Sequence:  siNA antisense region
guguagaagcgcacagacu

SEQ ID NO: 1378 - RNA, 19 nt, Artificial Sequence
  Description of Artificial Sequence:  siNA antisense region
agcuguccauucuucucug

SEQ ID NO: 1379 - RNA, 19 nt, Artificial Sequence
  Description of Artificial Sequence:  siNA antisense region
gugaaugucguguagauga

SEQ ID NO: 1380 - RNA, 19 nt, Artificial Sequence
  Description of Artificial Sequence:  siNA antisense region
accgaggguguguccucag

SEQ ID NO: 1381 - RNA, 19 nt, Artificial Sequence
  Description of Artificial Sequence:  siNA antisense region
uugaggaggcgcuggccca

SEQ ID NO: 1382 - RNA, 19 nt, Artificial Sequence
  Description of Artificial Sequence:  siNA antisense region
aggguguucagcacggagu

SEQ ID NO: 1383 - RNA, 19 nt, Artificial Sequence
  Description of Artificial Sequence:  siNA antisense region
augacgcugaucaugauga

SEQ ID NO: 1384 - RNA, 19 nt, Artificial Sequence
  Description of Artificial Sequence:  siNA antisense region
aagauggucauaaccacga

SEQ ID NO: 1385 - RNA, 19 nt, Artificial Sequence
  Description of Artificial Sequence:  siNA antisense region
uuguagagcaccaccaaga

SEQ ID NO: 1386 - RNA, 19 nt, Artificial Sequence
  Description of Artificial Sequence:  siNA antisense region
aacuuguagcagcgguacu

SEQ ID NO: 1387 - RNA, 19 nt, Artificial Sequence
  Description of Artificial Sequence:  siNA antisense region
aucaaccagccauggauga

SEQ ID NO: 1388 - RNA, 19 nt, Artificial Sequence
  Description of Artificial Sequence:  siNA antisense region
agcaucagugaagacauga

SEQ ID NO: 1389 - RNA, 19 nt, Artificial Sequence
  Description of Artificial Sequence:  siNA antisense region
uaggugaagaggaacagca

SEQ ID NO: 1390 - RNA, 19 nt, Artificial Sequence
  Description of Artificial Sequence:  siNA antisense region
acuuccccaagguagauau

SEQ ID NO: 1391 - RNA, 19 nt, Artificial Sequence
  Description of Artificial Sequence:  siNA antisense region
acauuguaggucuugagca

SEQ ID NO: 1392 - RNA, 19 nt, Artificial Sequence
  Description of Artificial Sequence:  siNA antisense region
gugggguaguccauggcca

SEQ ID NO: 1393 - RNA, 19 nt, Artificial Sequence
  Description of Artificial Sequence:  siNA antisense region
cagacagucagcaagaggg

SEQ ID NO: 1394 - RNA, 19 nt, Artificial Sequence
  Description of Artificial Sequence:  siNA antisense region
cccacugccccgaaguucc

SEQ ID NO: 1395 - RNA, 19 nt, Artificial Sequence
  Description of Artificial Sequence:  siNA antisense region
caguggaugcacaccaugc

SEQ ID NO: 1396 - RNA, 19 nt, Artificial Sequence
  Description of Artificial Sequence:  siNA antisense region
agcaccagagggcccuucc

SEQ ID NO: 1397 - RNA, 19 nt, Artificial Sequence
  Description of Artificial Sequence:  siNA antisense region
augagguaggccugcugca

SEQ ID NO: 1398 - RNA, 19 nt, Artificial Sequence
  Description of Artificial Sequence:  siNA antisense region
augagcgcacugaucauga

SEQ ID NO: 1399 - RNA, 19 nt, Artificial Sequence
  Description of Artificial Sequence:  siNA antisense region
uugaugaacacuagggcca

SEQ ID NO: 1400 - RNA, 19 nt, Artificial Sequence
  Description of Artificial Sequence:  siNA antisense region
gaccacucugggagguacu

SEQ ID NO: 1401 - RNA, 19 nt, Artificial Sequence
  Description of Artificial Sequence:  siNA antisense region
cccaggaugacccacgcgg

SEQ ID NO: 1402 - RNA, 19 nt, Artificial Sequence
  Description of Artificial Sequence:  siNA antisense region
ucauacacagagauggcgc

SEQ ID NO: 1403 - RNA, 19 nt, Artificial Sequence
  Description of Artificial Sequence:  siNA antisense region
cacagcacagccacgagau

SEQ ID NO: 1404 - RNA, 19 nt, Artificial Sequence
  Description of Artificial Sequence:  siNA antisense region
cucagaggcccuuugggac

SEQ ID NO: 1405 - RNA, 19 nt, Artificial Sequence
  Description of Artificial Sequence:  siNA antisense region
gcaguuucuaccagcauuc

SEQ ID NO: 1406 - RNA, 19 nt, Artificial Sequence
  Description of Artificial Sequence:  siNA antisense region
ggcucauuucucuccuggg

SEQ ID NO: 1407 - RNA, 19 nt, Artificial Sequence
  Description of Artificial Sequence:  siNA antisense region
aucagggcagggaauaugg

SEQ ID NO: 1408 - RNA, 19 nt, Artificial Sequence
  Description of Artificial Sequence:  siNA antisense region
accauggcagaugaguaua

SEQ ID NO: 1409 - RNA, 19 nt, Artificial Sequence
  Description of Artificial Sequence:  siNA antisense region
gccaugccaaccguccaca

SEQ ID NO: 1410 - RNA, 19 nt, Artificial Sequence
  Description of Artificial Sequence:  siNA antisense region
gaggagggguccagcuucg

SEQ ID NO: 1411 - RNA, 19 nt, Artificial Sequence
  Description of Artificial Sequence:  siNA antisense region
agcuggagggcacccugag

SEQ ID NO: 1412 - RNA, 19 nt, Artificial Sequence
  Description of Artificial Sequence:  siNA antisense region
aucuccgggucguagggga

SEQ ID NO: 1413 - RNA, 19 nt, Artificial Sequence
  Description of Artificial Sequence:  siNA antisense region
ucauaggagucuucuucca

SEQ ID NO: 1414 - RNA, 19 nt, Artificial Sequence
  Description of Artificial Sequence:  siNA antisense region
gaaggcuccccaaaacugu

SEQ ID NO: 1415 - RNA, 19 nt, Artificial Sequence
  Description of Artificial Sequence:  siNA antisense region
ucaaagacuucgggguaug

SEQ ID NO: 1416 - RNA, 19 nt, Artificial Sequence
  Description of Artificial Sequence:  siNA antisense region
uagccagucaagggaggcu

SEQ ID NO: 1417 - RNA, 19 nt, Artificial Sequence
  Description of Artificial Sequence:  siNA antisense region
uccagcuccuccccugggu

SEQ ID NO: 1418 - RNA, 19 nt, Artificial Sequence
  Description of Artificial Sequence:  siNA antisense region
ccccuuuccuccucuuccu

SEQ ID NO: 1419 - RNA, 19 nt, Artificial Sequence
  Description of Artificial Sequence:  siNA antisense region
ccgaggccaagcuucacgc

SEQ ID NO: 1420 - RNA, 19 nt, Artificial Sequence
  Description of Artificial Sequence:  siNA antisense region
cuguagaagaugaaguccc

SEQ ID NO: 1421 - RNA, 19 nt, Artificial Sequence
  Description of Artificial Sequence:  siNA antisense region
gccuugcccaccagcacac

SEQ ID NO: 1422 - RNA, 19 nt, Artificial Sequence
  Description of Artificial Sequence:  siNA antisense region
ccgcugcccguggcagccg

SEQ ID NO: 1423 - RNA, 19 nt, Artificial Sequence
  Description of Artificial Sequence:  siNA antisense region
agcgugguauuccaguccc

SEQ ID NO: 1424 - RNA, 19 nt, Artificial Sequence
  Description of Artificial Sequence:  siNA antisense region
auggccacgaagcaggcca

SEQ ID NO: 1425 - RNA, 19 nt, Artificial Sequence
  Description of Artificial Sequence:  siNA antisense region
agacacaagccaaugagga

SEQ ID NO: 1426 - RNA, 19 nt, Artificial Sequence
  Description of Artificial Sequence:  siNA antisense region
gcaagcagcaggaggguca

SEQ ID NO: 1427 - RNA, 19 nt, Artificial Sequence
  Description of Artificial Sequence:  siNA antisense region
agcgccuucuugaacacag

SEQ ID NO: 1428 - RNA, 19 nt, Artificial Sequence
  Description of Artificial Sequence:  siNA antisense region
gagauggggagggcgggca

SEQ ID NO: 1429 - RNA, 19 nt, Artificial Sequence
  Description of Artificial Sequence:  siNA antisense region
augagcccgaacgugaugg

SEQ ID NO: 1430 - RNA, 19 nt, Artificial Sequence
  Description of Artificial Sequence:  siNA antisense region
uccguggagaaguaaaaga

SEQ ID NO: 1431 - RNA, 19 nt, Artificial Sequence
  Description of Artificial Sequence:  siNA antisense region
aacggccgcaccagguugu

SEQ ID NO: 1432 - RNA, 19 nt, Artificial Sequence
  Description of Artificial Sequence:  siNA antisense region
gaggccaggguguccauga

SEQ ID NO: 1433 - RNA, 19 nt, Artificial Sequence
  Description of Artificial Sequence:  siNA antisense region
cagauguagagcugauggg

SEQ ID NO: 1434 - RNA, 19 nt, Artificial Sequence
  Description of Artificial Sequence:  siNA antisense region
guggcacaccaugucccuc

SEQ ID NO: 1435 - RNA, 19 nt, Artificial Sequence
  Description of Artificial Sequence:  siNA antisense region
cccugcagcuugcagccug

SEQ ID NO: 1436 - RNA, 19 nt, Artificial Sequence
  Description of Artificial Sequence:  siNA antisense region
cugcauccaaugaaaauuc

SEQ ID NO: 1437 - RNA, 19 nt, Artificial Sequence
  Description of Artificial Sequence:  siNA antisense region
gaguguaaaacuauacaac

SEQ ID NO: 1438 - RNA, 19 nt, Artificial Sequence
  Description of Artificial Sequence:  siNA antisense region
uaaaaauauauggcacuag

SEQ ID NO: 1439 - RNA, 19 nt, Artificial Sequence
  Description of Artificial Sequence:  siNA antisense region
uuaaggaaagaaaagucuu

SEQ ID NO: 1440 - RNA, 19 nt, Artificial Sequence
  Description of Artificial Sequence:  siNA antisense region
aaacacguacuuuauuuuu

SEQ ID NO: 1441 - RNA, 19 nt, Artificial Sequence
  Description of Artificial Sequence:  siNA antisense region
gccuccuccucaccaagua

SEQ ID NO: 1442 - RNA, 19 nt, Artificial Sequence
  Description of Artificial Sequence:  siNA antisense region
caccaaagagcugguucug

SEQ ID NO: 1443 - RNA, 19 nt, Artificial Sequence
  Description of Artificial Sequence:  siNA antisense region
uggugaugaaacagcuggc

SEQ ID NO: 1444 - RNA, 19 nt, Artificial Sequence
  Description of Artificial Sequence:  siNA antisense region
aaagcgggagccaaagucu

SEQ ID NO: 1445 - RNA, 19 nt, Artificial Sequence
  Description of Artificial Sequence:  siNA antisense region
ugaagcgaggcgcucccca

SEQ ID NO: 1446 - RNA, 19 nt, Artificial Sequence
  Description of Artificial Sequence:  siNA antisense region
ugcugugcuuccuguccgu

SEQ ID NO: 1447 - RNA, 19 nt, Artificial Sequence
  Description of Artificial Sequence:  siNA antisense region
aguucaucuggauaaaccu

SEQ ID NO: 1448 - RNA, 19 nt, Artificial Sequence
  Description of Artificial Sequence:  siNA antisense region
cccuaaucugaccuucuca

SEQ ID NO: 1449 - RNA, 19 nt, Artificial Sequence
  Description of Artificial Sequence:  siNA antisense region
cggaugcucuucuccccgc

SEQ ID NO: 1450 - RNA, 19 nt, Artificial Sequence
  Description of Artificial Sequence:  siNA antisense region
gcaucucagcccucaugcc

SEQ ID NO: 1451 - RNA, 19 nt, Artificial Sequence
  Description of Artificial Sequence:  siNA antisense region
cccgagcacacucuuugcg

SEQ ID NO: 1452 - RNA, 19 nt, Artificial Sequence
  Description of Artificial Sequence:  siNA antisense region
caggugccaggggccacuc

SEQ ID NO: 1453 - RNA, 19 nt, Artificial Sequence
  Description of Artificial Sequence:  siNA antisense region
cucuccagccagagcaccc

SEQ ID NO: 1454 - RNA, 19 nt, Artificial Sequence
  Description of Artificial Sequence:  siNA antisense region
guagggaacuggcuuuucc

SEQ ID NO: 1455 - RNA, 19 nt, Artificial Sequence
  Description of Artificial Sequence:  siNA antisense region
gcauugggaacacuccucg

SEQ ID NO: 1456 - RNA, 19 nt, Artificial Sequence
  Description of Artificial Sequence:  siNA antisense region
aaggacaucauggacaaag

SEQ ID NO: 1457 - RNA, 19 nt, Artificial Sequence
  Description of Artificial Sequence:  siNA antisense region
uaaaggcaauaaaauaaca

SEQ ID NO: 1458 - RNA, 19 nt, Artificial Sequence
  Description of Artificial Sequence:  siNA antisense region
agaacaggacucaguuucu

SEQ ID NO: 1459 - RNA, 19 nt, Artificial Sequence
  Description of Artificial Sequence:  siNA antisense region
agugugacugccguaacaa

SEQ ID NO: 1460 - RNA, 19 nt, Artificial Sequence
  Description of Artificial Sequence:  siNA antisense region
auuaagccacuucccagca

SEQ ID NO: 1461 - RNA, 19 nt, Artificial Sequence
  Description of Artificial Sequence:  siNA antisense region
cuauuuauugauauuacua

SEQ ID NO: 1462 - RNA, 19 nt, Artificial Sequence
  Description of Artificial Sequence:  siNA antisense region
uuucuaacaggacucaucu

SEQ ID NO: 1463 - RNA, 23 nt, Artificial Sequence
  Description of Artificial Sequence:  Target Sequence/siNA sense region
cagacuaugcagaugggagugaa

SEQ ID NO: 1464 - RNA, 23 nt, Artificial Sequence
  Description of Artificial Sequence:  Target Sequence/siNA sense region
guagcagaggaggaagaaguggc

SEQ ID NO: 1465 - RNA, 23 nt, Artificial Sequence
  Description of Artificial Sequence:  Target Sequence/siNA sense region
cugagguggaagaagaagaagcc

SEQ ID NO: 1466 - RNA, 23 nt, Artificial Sequence
  Description of Artificial Sequence:  Target Sequence/siNA sense region
agagagaaugucccaggucauga

SEQ ID NO: 1467 - RNA, 23 nt, Artificial Sequence
  Description of Artificial Sequence:  Target Sequence/siNA sense region
agaacuacaucaccgcucugcag

SEQ ID NO: 1468 - RNA, 23 nt, Artificial Sequence
  Description of Artificial Sequence:  Target Sequence/siNA sense region
auucuuuuggggcugacucugug

SEQ ID NO: 1469 - RNA, 23 nt, Artificial Sequence
  Description of Artificial Sequence:  Target Sequence/siNA sense region
ugaaguuggacagcaaaaccauu

SEQ ID NO: 1470 - RNA, 23 nt, Artificial Sequence
  Description of Artificial Sequence:  Target Sequence/siNA sense region
gaaguuggacagcaaaaccauug

SEQ ID NO: 1471 - RNA, 23 nt, Artificial Sequence
  Description of Artificial Sequence:  Target Sequence/siNA sense region
ccuggagccuuucuuugacucuc

SEQ ID NO: 1472 - RNA, 23 nt, Artificial Sequence
  Description of Artificial Sequence:  Target Sequence/siNA sense region
ggagccuuucuuugacucucugg

SEQ ID NO: 1473 - RNA, 23 nt, Artificial Sequence
  Description of Artificial Sequence:  Target Sequence/siNA sense region
agaaguucccugaugguuucugg

SEQ ID NO: 1474 - RNA, 23 nt, Artificial Sequence
  Description of Artificial Sequence:  Target Sequence/siNA sense region
aaugggugagguuaccaaccagu

SEQ ID NO: 1475 - RNA, 23 nt, Artificial Sequence
  Description of Artificial Sequence:  Target Sequence/siNA sense region
ucaccuuggacauggaagacugu

SEQ ID NO: 1476 - RNA, 23 nt, Artificial Sequence
  Description of Artificial Sequence:  Target Sequence/siNA sense region
ucaacccucaugaccauagccua

SEQ ID NO: 1477 - RNA, 23 nt, Artificial Sequence
  Description of Artificial Sequence:  Target Sequence/siNA sense region
ccuaacauuggugcaaagauugc

SEQ ID NO: 1478 - RNA, 23 nt, Artificial Sequence
  Description of Artificial Sequence:  Target Sequence/siNA sense region
uaugggaccugcuaaguguggaa

SEQ ID NO: 1479 - RNA, 23 nt, Artificial Sequence
  Description of Artificial Sequence:  Target Sequence/siNA sense region
cuaauggacgaccccaggguaac

SEQ ID NO: 1480 - RNA, 23 nt, Artificial Sequence
  Description of Artificial Sequence:  Target Sequence/siNA sense region
cuguugcacuccugaucuggaau

SEQ ID NO: 1481 - RNA, 23 nt, Artificial Sequence
  Description of Artificial Sequence:  Target Sequence/siNA sense region
gaaagcacagaaagggagucaca

SEQ ID NO: 1482 - RNA, 23 nt, Artificial Sequence
  Description of Artificial Sequence:  Target Sequence/siNA sense region
agggagucacaagacacuguugc

SEQ ID NO: 1483 - RNA, 23 nt, Artificial Sequence
  Description of Artificial Sequence:  Target Sequence/siNA sense region
gacuggaacacaaccauagccug

SEQ ID NO: 1484 - RNA, 23 nt, Artificial Sequence
  Description of Artificial Sequence:  Target Sequence/siNA sense region
uggaacacaaccauagccuguuu

SEQ ID NO: 1485 - RNA, 23 nt, Artificial Sequence
  Description of Artificial Sequence:  Target Sequence/siNA sense region
cuaccagauuugagggacgaggu

SEQ ID NO: 1486 - RNA, 23 nt, Artificial Sequence
  Description of Artificial Sequence:  Target Sequence/siNA sense region
uguaugcccaaagcgguagaauu

SEQ ID NO: 1487 - RNA, 23 nt, Artificial Sequence
  Description of Artificial Sequence:  Target Sequence/siNA sense region
uuacugaugaagaaacugaggcc

SEQ ID NO: 1488 - RNA, 23 nt, Artificial Sequence
  Description of Artificial Sequence:  Target Sequence/siNA sense region
agccagggagcaucauucauuua

SEQ ID NO: 1489 - RNA, 23 nt, Artificial Sequence
  Description of Artificial Sequence:  Target Sequence/siNA sense region
accgcuaugucuguagugggguu

SEQ ID NO: 1490 - RNA, 23 nt, Artificial Sequence
  Description of Artificial Sequence:  Target Sequence/siNA sense region
aagagcugacccucaaauacgga

SEQ ID NO: 1491 - RNA, 23 nt, Artificial Sequence
  Description of Artificial Sequence:  Target Sequence/siNA sense region
cacgacauucacugaggacacac

SEQ ID NO: 1492 - RNA, 23 nt, Artificial Sequence
  Description of Artificial Sequence:  Target Sequence/siNA sense region
gugcucaagaccuacaauguggc

SEQ ID NO: 1493 - RNA, 23 nt, Artificial Sequence
  Description of Artificial Sequence:  Target Sequence/siNA sense region
accuacaauguggccauggacua

SEQ ID NO: 1494 - RNA, 23 nt, Artificial Sequence
  Description of Artificial Sequence:  Target Sequence/siNA sense region
gaguguucccaaugcuuugucca

SEQ ID NO: 1495 - RNA, 21 nt, Artificial Sequence
  Description of Artificial Sequence: siNA sense region
  misc_feature (20)..(21): n stands for thymidine
gacuaugcagaugggagugnn

SEQ ID NO: 1496 - RNA, 21 nt, Artificial Sequence
  Description of Artificial Sequence:  siNA sense region
  misc_feature (20)..(21): n stands for thymidine
agcagaggaggaagaagugnn

SEQ ID NO: 1497 - RNA, 21 nt, Artificial Sequence
  Description of Artificial Sequence:  siNA sense region
  misc_feature (20)..(21): n stands for thymidine
gagguggaagaagaagaagnn

SEQ ID NO: 1498 - RNA, 21 nt, Artificial Sequence
  Description of Artificial Sequence:  siNA sense region
  misc_feature (20)..(21): n stands for thymidine
agagaaugucccaggucaunn

SEQ ID NO: 1499 - RNA, 21 nt, Artificial Sequence
  Description of Artificial Sequence:  siNA sense region
  misc_feature (20)..(21): n stands for thymidine
aacuacaucaccgcucugcnn

SEQ ID NO: 1500 - RNA, 21 nt, Artificial Sequence
  Description of Artificial Sequence:  siNA sense region
  misc_feature (20)..(21): n stands for thymidine
ucuuuuggggcugacucugnn

SEQ ID NO: 1501 - RNA, 21 nt, Artificial Sequence
  Description of Artificial Sequence:  siNA sense region
  misc_feature (20)..(21): n stands for thymidine
aaguuggacagcaaaaccann

SEQ ID NO: 1502 - RNA, 21 nt, Artificial Sequence
  Description of Artificial Sequence:  siNA sense region
  misc_feature (20)..(21): n stands for thymidine
aguuggacagcaaaaccaunn

SEQ ID NO: 1503 - RNA, 21 nt, Artificial Sequence
  Description of Artificial Sequence:  siNA antisense region
  misc_feature (20)..(21): n stands for thymidine
cacucccaucugcauagucnn

SEQ ID NO: 1504 - RNA, 21 nt, Artificial Sequence
  Description of Artificial Sequence:  siNA antisense region
  misc_feature (20)..(21): n stands for thymidine
cacuucuuccuccucugcunn

SEQ ID NO: 1505 - RNA, 21 nt, Artificial Sequence
  Description of Artificial Sequence:  siNA antisense region
  misc_feature (20)..(21): n stands for thymidine
cuucuucuucuuccaccucnn

SEQ ID NO: 1506 - RNA, 21 nt, Artificial Sequence
  Description of Artificial Sequence:  siNA antisense region
  misc_feature (20)..(21): n stands for thymidine
augaccugggacauucucunn

SEQ ID NO: 1507 - RNA, 21 nt, Artificial Sequence
  Description of Artificial Sequence:  siNA antisense region
  misc_feature (20)..(21): n stands for thymidine
gcagagcggugauguaguunn

SEQ ID NO: 1508 - RNA, 21 nt, Artificial Sequence
  Description of Artificial Sequence:  siNA antisense region
  misc_feature (20)..(21): n stands for thymidine
cagagucagccccaaaagann

SEQ ID NO: 1509 - RNA, 21 nt, Artificial Sequence
  Description of Artificial Sequence:  siNA antisense region
  misc_feature (20)..(21): n stands for thymidine
ugguuuugcuguccaacuunn

SEQ ID NO: 1510 - RNA, 21 nt, Artificial Sequence
  Description of Artificial Sequence:  siNA antisense region
  misc_feature (20)..(21): n stands for thymidine
augguuuugcuguccaacunn

SEQ ID NO: 1511 - RNA, 21 nt, Artificial Sequence
  Description of Artificial Sequence:  siNA sense region
  misc_feature (1)..(1): 5'-3 attached terminal deoxyabasic moeity
  misc_feature (3)..(4): 2'-deoxy-2'-fluoro
  misc_feature (6)..(6): 2'-deoxy-2'-fluoro
  misc_feature (8)..(8): 2'-deoxy-2'-fluoro
  misc_feature (12)..(12): 2'-deoxy-2'-fluoro
  misc_feature (18)..(18): 2'-deoxy-2'-fluoro
  misc_feature (20)..(20): n stands for thymidine
  misc_feature (21)..(21): 3'-3 attached terminal deoxyabasic moeity
gacuaugcagaugggagugnn

SEQ ID NO: 1512 - RNA, 21 nt, Artificial Sequence
  Description of Artificial Sequence:  siNA sense region
  misc_feature (1)..(1): 5'-3 attached terminal deoxyabasic moeity
  misc_feature (3)..(3): 2'-deoxy-2'-fluoro
  misc_feature (18)..(18): 2'-deoxy-2'-fluoro
  misc_feature (20)..(20): n stands for thymidine
  misc_feature (21)..(21): 3'-3 attached terminal deoxyabasic moeity
agcagaggaggaagaagugnn

SEQ ID NO: 1513 - RNA, 21 nt, Artificial Sequence
  Description of Artificial Sequence:  siNA sense region
  misc_feature: 2'-deoxy-2'-fluoro
  misc_feature (1)..(1): 5'-3 attached terminal deoxyabasic moeity
  misc_feature (5)..(5): 2'-deoxy-2'-fluoro
  misc_feature (20)..(20): n stands for thymidine
  misc_feature (21)..(21): 3'-3 attached terminal deoxyabasic moeity
gagguggaagaagaagaagnn

SEQ ID NO: 1514 - RNA, 21 nt, Artificial Sequence
  Description of Artificial Sequence:  siNA sense region
  misc_feature (1)..(1): 5'-3 attached terminal deoxyabasic moeity
  misc_feature (7)..(7): 2'-deoxy-2'-fluoro
  misc_feature (9)..(12): 2'-deoxy-2'-fluoro
  misc_feature (16)..(17): 2'-deoxy-2'-fluoro
  misc_feature (19)..(19): 2'-deoxy-2'-fluoro
  misc_feature (20)..(20): n stands for thymidine
  misc_feature (21)..(21): 3'-3 attached terminal deoxyabasic moeity
agagaaugucccaggucaunn

SEQ ID NO: 1515 - RNA, 21 nt, Artificial Sequence
  Description of Artificial Sequence:  siNA sense region
  misc_feature (1)..(1): 5'-3 attached terminal deoxyabasic moeity
  misc_feature (3)..(4): 2'-deoxy-2'-fluoro
  misc_feature (6)..(6): 2'-deoxy-2'-fluoro
  misc_feature (8)..(9): 2'-deoxy-2'-fluoro
  misc_feature (11)..(12): 2'-deoxy-2'-fluoro
  misc_feature (14)..(17): 2'-deoxy-2'-fluoro
  misc_feature (19)..(19): 2'-deoxy-2'-fluoro
  misc_feature (20)..(20): n stands for thymidine
  misc_feature (21)..(21): 3'-3 attached terminal deoxyabasic moeity
aacuacaucaccgcucugcnn

SEQ ID NO: 1516 - RNA, 21 nt, Artificial Sequence
  Description of Artificial Sequence:  siNA sense region
  misc_feature (1)..(1): 5'-3 attached terminal deoxyabasic moeity
  misc_feature (1)..(6): 2'-deoxy-2'-fluoro
  misc_feature (11)..(12): 2'-deoxy-2'-fluoro
  misc_feature (15)..(18): 2'-deoxy-2'-fluoro
  misc_feature (20)..(20): n stands for thymidine
  misc_feature (21)..(21): 3'-3 attached terminal deoxyabasic moeity
ucuuuuggggcugacucugnn

SEQ ID NO: 1517 - RNA, 21 nt, Artificial Sequence
  Description of Artificial Sequence:  siNA sense region
  misc_feature (1)..(1): 5'-3 attached terminal deoxyabasic moeity
  misc_feature (3)..(4): 2'-deoxy-2'-fluoro
  misc_feature (4)..(5): 2'-deoxy-2'-fluoro
  misc_feature (9)..(9): 2'-deoxy-2'-fluoro
  misc_feature (12)..(12): 2'-deoxy-2'-fluoro
  misc_feature (17)..(18): 2'-deoxy-2'-fluoro
  misc_feature (20)..(20): n stands for thymidine
  misc_feature (21)..(21): 3'-3 attached terminal deoxyabasic moeity
aaguuggacagcaaaaccann

SEQ ID NO: 1518 - RNA, 21 nt, Artificial Sequence
  Description of Artificial Sequence:  siNA sense region
  misc_feature (1)..(1): 5'-3 attached terminal deoxyabasic moeity
  misc_feature (3)..(4): 2'-deoxy-2'-fluoro
  misc_feature (8)..(8): 2'-deoxy-2'-fluoro
  misc_feature (11)..(11): 2'-deoxy-2'-fluoro
  misc_feature (16)..(17): 2'-deoxy-2'-fluoro
  misc_feature (19)..(19): 2'-deoxy-2'-fluoro
  misc_feature (20)..(20): n stands for thymidine
  misc_feature (21)..(21): 3'-3 attached terminal deoxyabasic moeity
aguuggacagcaaaaccaunn

SEQ ID NO: 1519 - RNA, 21 nt, Artificial Sequence
  Description of Artificial Sequence:  siNA antisense region
  misc_feature (1)..(1): 2'-deoxy-2'-fluoro
  misc_feature (3)..(7): 2'-deoxy-2'-fluoro
  misc_feature (9)..(11): 2'-deoxy-2'-fluoro
  misc_feature (13)..(13): 2'-deoxy-2'-fluoro
  misc_feature (15)..(15): 2'-deoxy-2'-fluoro
  misc_feature (18)..(19): 2'-deoxy-2'-fluoro
  misc_feature (20)..(20): Phosphorothioate 3'-Internucleotide Linkage
  misc_feature (21)..(21): n stands for thymidine
cacucccaucugcauagucnn

SEQ ID NO: 1520 - RNA, 21 nt, Artificial Sequence
  Description of Artificial Sequence:  siNA antisense region
  misc_feature (1)..(1): 2'-deoxy-2'-fluoro
  misc_feature (3)..(16): 2'-deoxy-2'-fluoro
  misc_feature (18)..(19): 2'-deoxy-2'-fluoro
  misc_feature (20)..(20): Phosphorothioate 3'-Internucleotide Linkage
  misc_feature (21)..(21): n stands for thymidine
cacuucuuccuccucugcunn

SEQ ID NO: 1521 - RNA, 21 nt, Artificial Sequence
  Description of Artificial Sequence:  siNA antisense region
  misc_feature (1)..(14): 2'-deoxy-2'-fluoro
  misc_feature (16)..(19): 2'-deoxy-2'-fluoro
  misc_feature (20)..(20): Phosphorothioate 3'-Internucleotide Linkage
  misc_feature (21)..(21): n stands for thymidine
cuucuucuucuuccaccucnn

SEQ ID NO: 1522 - RNA, 21 nt, Artificial Sequence
  Description of Artificial Sequence:  siNA antisense region
  misc_feature (2)..(2): 2'-deoxy-2'-fluoro
  misc_feature (5)..(7): 2'-deoxy-2'-fluoro
  misc_feature (12)..(12): 2'-deoxy-2'-fluoro
  misc_feature (14)..(19): 2'-deoxy-2'-fluoro
  misc_feature (20)..(20): Phosphorothioate 3'-Internucleotide Linkage
  misc_feature (21)..(21): n stands for thymidine
augaccugggacauucucunn

SEQ ID NO: 1523 - RNA, 21 nt, Artificial Sequence
  Description of Artificial Sequence:  siNA antisense region
  misc_feature (2)..(2): 2'-deoxy-2'-fluoro
  misc_feature (7)..(7): 2'-deoxy-2'-fluoro
  misc_feature (10)..(10): 2'-deoxy-2'-fluoro
  misc_feature (13)..(13): 2'-deoxy-2'-fluoro
  misc_feature (15)..(15): 2'-deoxy-2'-fluoro
  misc_feature (18)..(19): 2'-deoxy-2'-fluoro
  misc_feature (20)..(20): Phosphorothioate 3'-Internucleotide Linkage
  misc_feature (21)..(21): n stands for thymidine
gcagagcggugauguaguunn

SEQ ID NO: 1524 - RNA, 21 nt, Artificial Sequence
  Description of Artificial Sequence:  siNA antisense region
  misc_feature: 2'-deoxy-2'-fluoro
  misc_feature (1)..(1): 2'-deoxy-2'-fluoro
  misc_feature (6)..(7): 2'-deoxy-2'-fluoro
  misc_feature (10)..(13): 2'-deoxy-2'-fluoro
  misc_feature (20)..(20): Phosphorothioate 3'-Internucleotide Linkage
  misc_feature (21)..(21): n stands for thymidine
cagagucagccccaaaagann

SEQ ID NO: 1525 - RNA, 21 nt, Artificial Sequence
  Description of Artificial Sequence:  siNA antisense region
  misc_feature (1)..(1): 2'-deoxy-2'-fluoro
  misc_feature (4)..(7): 2'-deoxy-2'-fluoro
  misc_feature (9)..(10): 2'-deoxy-2'-fluoro
  misc_feature (12)..(14): 2'-deoxy-2'-fluoro
  misc_feature (17)..(19): 2'-deoxy-2'-fluoro
  misc_feature (20)..(20): Phosphorothioate 3'-Internucleotide Linkage
  misc_feature (21)..(21): n stands for thymidine
ugguuuugcuguccaacuunn

SEQ ID NO: 1526 - RNA, 21 nt, Artificial Sequence
  Description of Artificial Sequence:  siNA antisense region
  misc_feature (2)..(2): 2'-deoxy-2'-fluoro
  misc_feature (5)..(8): 2'-deoxy-2'-fluoro
  misc_feature (10)..(11): 2'-deoxy-2'-fluoro
  misc_feature (13)..(15): 2'-deoxy-2'-fluoro
  misc_feature (18)..(19): 2'-deoxy-2'-fluoro
  misc_feature (20)..(20): Phosphorothioate 3'-Internucleotide Linkage
  misc_feature (21)..(21): n stands for thymidine
augguuuugcuguccaacunn

SEQ ID NO: 1527 - RNA, 21 nt, Artificial Sequence
  Description of Artificial Sequence:  siNA sense region
  misc_feature (1)..(1): 5'-3 attached terminal deoxyabasic moeity
  misc_feature (1)..(2): 2'-deoxy
  misc_feature (1)..(2): 2'-deoxy
  misc_feature (3)..(4): 2'-deoxy-2'-fluoro
  misc_feature (5)..(5): 2'-deoxy
  misc_feature (5)..(5): 2'-deoxy
  misc_feature (6)..(6): 2'-deoxy-2'-fluoro
  misc_feature (7)..(7): 2'-deoxy
  misc_feature (7)..(7): 2'-deoxy
  misc_feature (8)..(8): 2'-deoxy-2'-fluoro
  misc_feature (9)..(11): 2'-deoxy
  misc_feature (9)..(11): 2'-deoxy
  misc_feature (12)..(12): 2'-deoxy-2'-fluoro
  misc_feature (13)..(17): 2'-deoxy
  misc_feature (13)..(17): 2'-deoxy
  misc_feature (18)..(18): 2'-deoxy-2'-fluoro
  misc_feature (19)..(19): 2'-deoxy
  misc_feature (19)..(19): 2'-deoxy
  misc_feature (20)..(20): n stands for thymidine
  misc_feature (21)..(21): 3'-3 attached terminal deoxyabasic moeity
gacuaugcagaugggagugnn

SEQ ID NO: 1528 - RNA, 21 nt, Artificial Sequence
  Description of Artificial Sequence:  siNA sense region
  misc_feature (1)..(1): 5'-3 attached terminal deoxyabasic moeity
  misc_feature (1)..(2): 2'-deoxy
  misc_feature (1)..(2): 2'-deoxy
  misc_feature (3)..(3): 2'-deoxy-2'-fluoro
  misc_feature (4)..(17): 2'-deoxy
  misc_feature (4)..(17): 2'-deoxy
  misc_feature (18)..(18): 2'-deoxy-2'-fluoro
  misc_feature (19)..(19): 2'-deoxy
  misc_feature (19)..(19): 2'-deoxy
  misc_feature (20)..(20): n stands for thymidine
  misc_feature (21)..(21): 3'-3 attached terminal deoxyabasic moeity
agcagaggaggaagaagugnn

SEQ ID NO: 1529 - RNA, 21 nt, Artificial Sequence
  Description of Artificial Sequence:  siNA sense region
  misc_feature (1)..(1): 5'-3 attached terminal deoxyabasic moeity
  misc_feature (1)..(4): 2'-deoxy
  misc_feature (1)..(4): 2'-deoxy
  misc_feature (5)..(5): 2'-deoxy-2'-fluoro
  misc_feature (6)..(19): 2'-deoxy
  misc_feature (6)..(19): 2'-deoxy
  misc_feature (20)..(20): n stands for thymidine
  misc_feature (21)..(21): 3'-3 attached terminal deoxyabasic moeity
gagguggaagaagaagaagnn

SEQ ID NO: 1530 - RNA, 21 nt, Artificial Sequence
  Description of Artificial Sequence:  siNA sense region
  misc_feature (1)..(1): 5'-3 attached terminal deoxyabasic moeity
  misc_feature (1)..(6): 2'-deoxy
  misc_feature (1)..(6): 2'-deoxy
  misc_feature (7)..(7): 2'-deoxy-2'-fluoro
  misc_feature (8)..(8): 2'-deoxy
  misc_feature (8)..(8): 2'-deoxy
  misc_feature (9)..(12): 2'-deoxy-2'-fluoro
  misc_feature (13)..(15): 2'-deoxy
  misc_feature (13)..(15): 2'-deoxy
  misc_feature (16)..(17): 2'-deoxy-2'-fluoro
  misc_feature (18)..(18): 2'-deoxy
  misc_feature (18)..(18): 2'-deoxy
  misc_feature (19)..(19): 2'-deoxy-2'-fluoro
  misc_feature (20)..(20): n stands for thymidine
  misc_feature (21)..(21): 3'-3 attached terminal deoxyabasic moeity
agagaaugucccaggucaunn

SEQ ID NO: 1531 - RNA, 21 nt, Artificial Sequence
  Description of Artificial Sequence:  siNA sense region
  misc_feature (1)..(1): 5'-3 attached terminal deoxyabasic moeity
  misc_feature (1)..(2): 2'-deoxy
  misc_feature (1)..(2): 2'-deoxy
  misc_feature (3)..(4): 2'-deoxy-2'-fluoro
  misc_feature (5)..(5): 2'-deoxy
  misc_feature (5)..(5): 2'-deoxy
  misc_feature (6)..(6): 2'-deoxy-2'-fluoro
  misc_feature (7)..(7): 2'-deoxy
  misc_feature (7)..(7): 2'-deoxy
  misc_feature (8)..(9): 2'-deoxy-2'-fluoro
  misc_feature (10)..(10): 2'-deoxy
  misc_feature (10)..(10): 2'-deoxy
  misc_feature (11)..(12): 2'-deoxy-2'-fluoro
  misc_feature (13)..(13): 2'-deoxy
  misc_feature (13)..(13): 2'-deoxy
  misc_feature (14)..(17): 2'-deoxy-2'-fluoro
  misc_feature (18)..(18): 2'-deoxy
  misc_feature (18)..(18): 2'-deoxy
  misc_feature (19)..(19): 2'-deoxy-2'-fluoro
  misc_feature (20)..(20): n stands for thymidine
  misc_feature (21)..(21): 3'-3 attached terminal deoxyabasic moeity
aacuacaucaccgcucugcnn

SEQ ID NO: 1532 - RNA, 21 nt, Artificial Sequence
  Description of Artificial Sequence:  siNA sense region
  misc_feature (1)..(1): 5'-3 attached terminal deoxyabasic moeity
  misc_feature (1)..(6): 2'-deoxy-2'-fluoro
  misc_feature (7)..(10): 2'-deoxy
  misc_feature (7)..(10): 2'-deoxy
  misc_feature (11)..(12): 2'-deoxy-2'-fluoro
  misc_feature (13)..(14): 2'-deoxy
  misc_feature (13)..(14): 2'-deoxy
  misc_feature (15)..(18): 2'-deoxy-2'-fluoro
  misc_feature (19)..(19): 2'-deoxy
  misc_feature (19)..(19): 2'-deoxy
  misc_feature (20)..(20): n stands for thymidine
  misc_feature (21)..(21): 3'-3 attached terminal deoxyabasic moeity
ucuuuuggggcugacucugnn

SEQ ID NO: 1533 - RNA, 21 nt, Artificial Sequence
  Description of Artificial Sequence:  siNA sense region
  misc_feature (1)..(1): 5'-3 attached terminal deoxyabasic moeity
  misc_feature (1)..(3): 2'-deoxy
  misc_feature (1)..(3): 2'-deoxy
  misc_feature (4)..(5): 2'-deoxy-2'-fluoro
  misc_feature (6)..(8): 2'-deoxy
  misc_feature (6)..(8): 2'-deoxy
  misc_feature (9)..(9): 2'-deoxy-2'-fluoro
  misc_feature (10)..(11): 2'-deoxy
  misc_feature (10)..(11): 2'-deoxy
  misc_feature (12)..(12): 2'-deoxy-2'-fluoro
  misc_feature (13)..(16): 2'-deoxy
  misc_feature (13)..(16): 2'-deoxy
  misc_feature (17)..(18): 2'-deoxy-2'-fluoro
  misc_feature (19)..(19): 2'-deoxy
  misc_feature (19)..(19): 2'-deoxy
  misc_feature (20)..(20): n stands for thymidine
  misc_feature (21)..(21): 3'-3 attached terminal deoxyabasic moeity
aaguuggacagcaaaaccann

SEQ ID NO: 1534 - RNA, 21 nt, Artificial Sequence
  Description of Artificial Sequence:  siNA sense region
  misc_feature (1)..(1): 5'-3 attached terminal deoxyabasic moeity
  misc_feature (1)..(2): 2'-deoxy
  misc_feature (1)..(2): 2'-deoxy
  misc_feature (3)..(4): 2'-deoxy-2'-fluoro
  misc_feature (5)..(7): 2'-deoxy
  misc_feature (5)..(7): 2'-deoxy
  misc_feature (8)..(8): 2'-deoxy-2'-fluoro
  misc_feature (9)..(10): 2'-deoxy
  misc_feature (9)..(10): 2'-deoxy
  misc_feature (11)..(11): 2'-deoxy-2'-fluoro
  misc_feature (12)..(15): 2'-deoxy
  misc_feature (12)..(15): 2'-deoxy
  misc_feature (16)..(17): 2'-deoxy-2'-fluoro
  misc_feature (18)..(18): 2'-deoxy
  misc_feature (18)..(18): 2'-deoxy
  misc_feature (19)..(19): 2'-deoxy-2'-fluoro
  misc_feature (20)..(20): n stands for thymidine
  misc_feature (21)..(21): 3'-3 attached terminal deoxyabasic moeity
aguuggacagcaaaaccaunn

SEQ ID NO: 1535 - RNA, 21 nt, Artificial Sequence
  Description of Artificial Sequence:  siNA antisense region
  misc_feature (1)..(1): 2'-deoxy-2'-fluoro
  misc_feature (2)..(2): 2'-deoxy
  misc_feature (2)..(2): 2'-deoxy
  misc_feature (3)..(7): 2'-deoxy-2'-fluoro
  misc_feature (8)..(8): 2'-deoxy
  misc_feature (8)..(8): 2'-deoxy
  misc_feature (9)..(11): 2'-deoxy-2'-fluoro
  misc_feature (12)..(12): 2'-deoxy
  misc_feature (12)..(12): 2'-deoxy
  misc_feature (13)..(13): 2'-deoxy-2'-fluoro
  misc_feature (14)..(14): 2'-deoxy
  misc_feature (14)..(14): 2'-deoxy
  misc_feature (15)..(15): 2'-deoxy-2'-fluoro
  misc_feature (16)..(17): 2'-deoxy
  misc_feature (16)..(17): 2'-deoxy
  misc_feature (18)..(19): 2'-deoxy-2'-fluoro
  misc_feature (20)..(20): Phosphorothioate 3'-Internucleotide Linkage
  misc_feature (21)..(21): n stands for thymidine
cacucccaucugcauagucnn

SEQ ID NO: 1536 - RNA, 21 nt, Artificial Sequence
  Description of Artificial Sequence:  siNA antisense region
  misc_feature (1)..(1): 2'-deoxy-2'-fluoro
  misc_feature (2)..(2): 2'-deoxy
  misc_feature (2)..(2): 2'-deoxy
  misc_feature (3)..(16): 2'-deoxy-2'-fluoro
  misc_feature (17)..(17): 2'-deoxy
  misc_feature (17)..(17): 2'-deoxy
  misc_feature (18)..(19): 2'-deoxy-2'-fluoro
  misc_feature (20)..(20): Phosphorothioate 3'-Internucleotide Linkage
  misc_feature (21)..(21): n stands for thymidine
cacuucuuccuccucugcunn

SEQ ID NO: 1537 - RNA, 21 nt, Artificial Sequence
  Description of Artificial Sequence:  siNA antisense region
  misc_feature (1)..(14): 2'-deoxy-2'-fluoro
  misc_feature (15)..(15): 2'-deoxy
  misc_feature (15)..(15): 2'-deoxy
  misc_feature (16)..(19): 2'-deoxy-2'-fluoro
  misc_feature (20)..(20): Phosphorothioate 3'-Internucleotide Linkage
  misc_feature (21)..(21): n stands for thymidine
cuucuucuucuuccaccucnn

SEQ ID NO: 1538 - RNA, 21 nt, Artificial Sequence
  Description of Artificial Sequence:  siNA antisense region
  misc_feature (1)..(1): 2'-deoxy
  misc_feature (1)..(1): 2'-deoxy
  misc_feature (2)..(2): 2'-deoxy-2'-fluoro
  misc_feature (3)..(4): 2'-deoxy
  misc_feature (3)..(4): 2'-deoxy
  misc_feature (5)..(7): 2'-deoxy-2'-fluoro
  misc_feature (8)..(11): 2'-deoxy
  misc_feature (8)..(11): 2'-deoxy
  misc_feature (12)..(12): 2'-deoxy-2'-fluoro
  misc_feature (13)..(13): 2'-deoxy
  misc_feature (13)..(13): 2'-deoxy
  misc_feature (14)..(19): 2'-deoxy-2'-fluoro
  misc_feature (20)..(20): Phosphorothioate 3'-Internucleotide Linkage
  misc_feature (21)..(21): n stands for thymidine
augaccugggacauucucunn

SEQ ID NO: 1539 - RNA, 21 nt, Artificial Sequence
  Description of Artificial Sequence:  siNA antisense region
  misc_feature (1)..(1): 2'-deoxy
  misc_feature (1)..(1): 2'-deoxy
  misc_feature (2)..(2): 2'-deoxy-2'-fluoro
  misc_feature (3)..(6): 2'-deoxy
  misc_feature (3)..(6): 2'-deoxy
  misc_feature (7)..(7): 2'-deoxy-2'-fluoro
  misc_feature (8)..(9): 2'-deoxy
  misc_feature (8)..(9): 2'-deoxy
  misc_feature (10)..(10): 2'-deoxy-2'-fluoro
  misc_feature (11)..(12): 2'-deoxy
  misc_feature (11)..(12): 2'-deoxy
  misc_feature (13)..(13): 2'-deoxy-2'-fluoro
  misc_feature (14)..(14): 2'-deoxy
  misc_feature (14)..(14): 2'-deoxy
  misc_feature (15)..(15): 2'-deoxy-2'-fluoro
  misc_feature (16)..(17): 2'-deoxy
  misc_feature (16)..(17): 2'-deoxy
  misc_feature (18)..(19): 2'-deoxy-2'-fluoro
  misc_feature (20)..(20): Phosphorothioate 3'-Internucleotide Linkage
  misc_feature (21)..(21): n stands for thymidine
gcagagcggugauguaguunn

SEQ ID NO: 1540 - RNA, 21 nt, Artificial Sequence
  Description of Artificial Sequence:  siNA antisense region
  misc_feature (1)..(1): 2'-deoxy-2'-fluoro
  misc_feature (2)..(5): 2'-deoxy
  misc_feature (2)..(5): 2'-deoxy
  misc_feature (6)..(7): 2'-deoxy-2'-fluoro
  misc_feature (8)..(9): 2'-deoxy
  misc_feature (8)..(9): 2'-deoxy
  misc_feature (10)..(13): 2'-deoxy-2'-fluoro
  misc_feature (14)..(19): 2'-deoxy
  misc_feature (14)..(19): 2'-deoxy
  misc_feature (20)..(20): Phosphorothioate 3'-Internucleotide Linkage
  misc_feature (21)..(21): n stands for thymidine
cagagucagccccaaaagann

SEQ ID NO: 1541 - RNA, 21 nt, Artificial Sequence
  Description of Artificial Sequence:  siNA antisense region
  misc_feature (1)..(1): 2'-deoxy-2'-fluoro
  misc_feature (2)..(3): 2'-deoxy
  misc_feature (2)..(3): 2'-deoxy
  misc_feature (4)..(7): 2'-deoxy-2'-fluoro
  misc_feature (8)..(8): 2'-deoxy
  misc_feature (8)..(8): 2'-deoxy
  misc_feature (9)..(10): 2'-deoxy-2'-fluoro
  misc_feature (11)..(11): 2'-deoxy
  misc_feature (11)..(11): 2'-deoxy
  misc_feature (12)..(14): 2'-deoxy-2'-fluoro
  misc_feature (15)..(16): 2'-deoxy
  misc_feature (15)..(16): 2'-deoxy
  misc_feature (17)..(19): 2'-deoxy-2'-fluoro
  misc_feature (20)..(20): Phosphorothioate 3'-Internucleotide Linkage
  misc_feature (21)..(21): n stands for thymidine
ugguuuugcuguccaacuunn

SEQ ID NO: 1542 - RNA, 21 nt, Artificial Sequence
  Description of Artificial Sequence:  siNA antisense region
  misc_feature (1)..(1): 2'-deoxy
  misc_feature (1)..(1): 2'-deoxy
  misc_feature (2)..(2): 2'-deoxy-2'-fluoro
  misc_feature (3)..(4): 2'-deoxy
  misc_feature (3)..(4): 2'-deoxy
  misc_feature (5)..(8): 2'-deoxy-2'-fluoro
  misc_feature (9)..(9): 2'-deoxy
  misc_feature (9)..(9): 2'-deoxy
  misc_feature (10)..(11): 2'-deoxy-2'-fluoro
  misc_feature (12)..(12): 2'-deoxy
  misc_feature (12)..(12): 2'-deoxy
  misc_feature (13)..(15): 2'-deoxy-2'-fluoro
  misc_feature (16)..(17): 2'-deoxy
  misc_feature (16)..(17): 2'-deoxy
  misc_feature (18)..(19): 2'-deoxy-2'-fluoro
  misc_feature (20)..(20): Phosphorothioate 3'-Internucleotide Linkage
  misc_feature (21)..(21): n stands for thymidine
augguuuugcuguccaacunn

SEQ ID NO: 1543 - RNA, 21 nt, Artificial Sequence
  Description of Artificial Sequence:  siNA sense region
  misc_feature (1)..(1): 5'-3 attached terminal deoxyabasic moeity
  misc_feature (1)..(2): 2'-O-methyl
  misc_feature (3)..(4): 2'-deoxy-2'-fluoro
  misc_feature (5)..(5): 2'-O-methyl
  misc_feature (6)..(6): 2'-deoxy-2'-fluoro
  misc_feature (7)..(7): 2'-O-methyl
  misc_feature (8)..(8): 2'-deoxy-2'-fluoro
  misc_feature (9)..(11): 2'-O-methyl
  misc_feature (12)..(12): 2'-deoxy-2'-fluoro
  misc_feature (13)..(17): 2'-O-methyl
  misc_feature (18)..(18): 2'-deoxy-2'-fluoro
  misc_feature (19)..(19): 2'-O-methyl
  misc_feature (20)..(20): n stands for thymidine
  misc_feature (21)..(21): 3'-3 attached terminal deoxyabasic moeity
gacuaugcagaugggagugnn

SEQ ID NO: 1544 - RNA, 21 nt, Artificial Sequence
  Description of Artificial Sequence:  siNA sense region
  misc_feature (1)..(1): 5'-3 attached terminal deoxyabasic moeity
  misc_feature (1)..(2): 2'-O-methyl
  misc_feature (3)..(3): 2'-deoxy-2'-fluoro
  misc_feature (4)..(17): 2'-O-methyl
  misc_feature (18)..(18): 2'-deoxy-2'-fluoro
  misc_feature (19)..(19): 2'-O-methyl
  misc_feature (20)..(20): n stands for thymidine
  misc_feature (21)..(21): 3'-3 attached terminal deoxyabasic moeity
agcagaggaggaagaagugnn

SEQ ID NO: 1545 - RNA, 21 nt, Artificial Sequence
  Description of Artificial Sequence:  siNA sense region
  misc_feature (1)..(1): 5'-3 attached terminal deoxyabasic moeity
  misc_feature (1)..(4): 2'-O-methyl
  misc_feature (5)..(5): 2'-deoxy-2'-fluoro
  misc_feature (6)..(19): 2'-O-methyl
  misc_feature (20)..(20): n stands for thymidine
  misc_feature (21)..(21): 3'-3 attached terminal deoxyabasic moeity
gagguggaagaagaagaagnn

SEQ ID NO: 1546 - RNA, 21 nt, Artificial Sequence
  Description of Artificial Sequence:  siNA sense region
  misc_feature (1)..(1): 5'-3 attached terminal deoxyabasic moeity
  misc_feature (1)..(6): 2'-O-methyl
  misc_feature (7)..(7): 2'-deoxy-2'-fluoro
  misc_feature (8)..(8): 2'-O-methyl
  misc_feature (9)..(12): 2'-deoxy-2'-fluoro
  misc_feature (13)..(15): 2'-O-methyl
  misc_feature (16)..(17): 2'-deoxy-2'-fluoro
  misc_feature (18)..(18): 2'-O-methyl
  misc_feature (19)..(19): 2'-deoxy-2'-fluoro
  misc_feature (20)..(20): n stands for thymidine
  misc_feature (21)..(21): 3'-3 attached terminal deoxyabasic moeity
agagaaugucccaggucaunn

SEQ ID NO: 1547 - RNA, 21 nt, Artificial Sequence
  Description of Artificial Sequence:  siNA sense region
  misc_feature (1)..(1): 5'-3 attached terminal deoxyabasic moeity
  misc_feature (1)..(2): 2'-O-methyl
  misc_feature (3)..(4): 2'-deoxy-2'-fluoro
  misc_feature (5)..(5): 2'-O-methyl
  misc_feature (6)..(6): 2'-deoxy-2'-fluoro
  misc_feature (7)..(7): 2'-O-methyl
  misc_feature (8)..(9): 2'-deoxy-2'-fluoro
  misc_feature (10)..(10): 2'-O-methyl
  misc_feature (11)..(12): 2'-deoxy-2'-fluoro
  misc_feature (13)..(13): 2'-O-methyl
  misc_feature (14)..(17): 2'-deoxy-2'-fluoro
  misc_feature (18)..(18): 2'-O-methyl
  misc_feature (19)..(19): 2'-deoxy-2'-fluoro
  misc_feature (20)..(20): n stands for thymidine
  misc_feature (21)..(21): 3'-3 attached terminal deoxyabasic moeity
aacuacaucaccgcucugcnn

SEQ ID NO: 1548 - RNA, 21 nt, Artificial Sequence
  Description of Artificial Sequence:  siNA sense region
  misc_feature (1)..(1): 5'-3 attached terminal deoxyabasic moeity
  misc_feature (1)..(6): 2'-deoxy-2'-fluoro
  misc_feature (7)..(10): 2'-O-methyl
  misc_feature (11)..(12): 2'-deoxy-2'-fluoro
  misc_feature (13)..(14): 2'-O-methyl
  misc_feature (15)..(18): 2'-deoxy-2'-fluoro
  misc_feature (19)..(19): 2'-O-methyl
  misc_feature (20)..(20): n stands for thymidine
  misc_feature (21)..(21): 3'-3 attached terminal deoxyabasic moeity
ucuuuuggggcugacucugnn

SEQ ID NO: 1549 - RNA, 21 nt, Artificial Sequence
  Description of Artificial Sequence:  siNA sense region
  misc_feature (1)..(1): 5'-3 attached terminal deoxyabasic moeity
  misc_feature (1)..(3): 2'-O-methyl
  misc_feature (4)..(5): 2'-deoxy-2'-fluoro
  misc_feature (6)..(8): 2'-O-methyl
  misc_feature (9)..(9): 2'-deoxy-2'-fluoro
  misc_feature (10)..(11): 2'-O-methyl
  misc_feature (12)..(12): 2'-deoxy-2'-fluoro
  misc_feature (13)..(16): 2'-O-methyl
  misc_feature (17)..(18): 2'-deoxy-2'-fluoro
  misc_feature (19)..(19): 2'-O-methyl
  misc_feature (20)..(20): n stands for thymidine
  misc_feature (21)..(21): 3'-3 attached terminal deoxyabasic moeity
aaguuggacagcaaaaccann

SEQ ID NO: 1550 - RNA, 21 nt, Artificial Sequence
  Description of Artificial Sequence:  siNA sense region
  misc_feature (1)..(1): 5'-3 attached terminal deoxyabasic moeity
  misc_feature (1)..(2): 2'-O-methyl
  misc_feature (3)..(4): 2'-deoxy-2'-fluoro
  misc_feature (5)..(7): 2'-O-methyl
  misc_feature (8)..(8): 2'-deoxy-2'-fluoro
  misc_feature (9)..(10): 2'-O-methyl
  misc_feature (11)..(11): 2'-deoxy-2'-fluoro
  misc_feature (12)..(15): 2'-O-methyl
  misc_feature (16)..(17): 2'-deoxy-2'-fluoro
  misc_feature (18)..(18): 2'-O-methyl
  misc_feature (19)..(19): 2'-deoxy-2'-fluoro
  misc_feature (20)..(20): n stands for thymidine
  misc_feature (21)..(21): 3'-3 attached terminal deoxyabasic moeity
aguuggacagcaaaaccaunn

SEQ ID NO: 1551 - RNA, 21 nt, Artificial Sequence
  Description of Artificial Sequence:  siNA antisense region
  misc_feature (1)..(1): 2'-deoxy-2'-fluoro
  misc_feature (2)..(2): 2'-O-methyl
  misc_feature (3)..(7): 2'-deoxy-2'-fluoro
  misc_feature (8)..(8): 2'-O-methyl
  misc_feature (9)..(11): 2'-deoxy-2'-fluoro
  misc_feature (12)..(12): 2'-O-methyl
  misc_feature (13)..(13): 2'-deoxy-2'-fluoro
  misc_feature (14)..(14): 2'-O-methyl
  misc_feature (15)..(15): 2'-deoxy-2'-fluoro
  misc_feature (16)..(17): 2'-O-methyl
  misc_feature (18)..(19): 2'-deoxy-2'-fluoro
  misc_feature (20)..(20): Phosphorothioate 3'-Internucleotide Linkage
  misc_feature (21)..(21): n stands for thymidine
cacucccaucugcauagucnn

SEQ ID NO: 1552 - RNA, 21 nt, Artificial Sequence
  Description of Artificial Sequence:  siNA antisense region
  misc_feature (1)..(1): 2'-deoxy-2'-fluoro
  misc_feature (2)..(2): 2'-O-methyl
  misc_feature (3)..(16): 2'-deoxy-2'-fluoro
  misc_feature (17)..(17): 2'-O-methyl
  misc_feature (18)..(19): 2'-deoxy-2'-fluoro
  misc_feature (20)..(20): Phosphorothioate 3'-Internucleotide Linkage
  misc_feature (21)..(21): n stands for thymidine
cacuucuuccuccucugcunn

SEQ ID NO: 1553 - RNA, 21 nt, Artificial Sequence
  Description of Artificial Sequence:  siNA antisense region
  misc_feature (1)..(14): 2'-deoxy-2'-fluoro
  misc_feature (15)..(15): 2'-O-methyl
  misc_feature (16)..(19): 2'-deoxy-2'-fluoro
  misc_feature (20)..(20): Phosphorothioate 3'-Internucleotide Linkage
  misc_feature (21)..(21): n stands for thymidine
cuucuucuucuuccaccucnn

SEQ ID NO: 1554 - RNA, 21 nt, Artificial Sequence
  Description of Artificial Sequence:  siNA antisense region
  misc_feature (1)..(1): 2'-O-methyl
  misc_feature (2)..(2): 2'-deoxy-2'-fluoro
  misc_feature (3)..(4): 2'-O-methyl
  misc_feature (5)..(7): 2'-deoxy-2'-fluoro
  misc_feature (8)..(11): 2'-O-methyl
  misc_feature (12)..(12): 2'-deoxy-2'-fluoro
  misc_feature (13)..(13): 2'-O-methyl
  misc_feature (14)..(19): 2'-deoxy-2'-fluoro
  misc_feature (20)..(20): Phosphorothioate 3'-Internucleotide Linkage
  misc_feature (21)..(21): n stands for thymidine
augaccugggacauucucunn

SEQ ID NO: 1555 - RNA, 21 nt, Artificial Sequence
  Description of Artificial Sequence:  siNA antisense region
  misc_feature (1)..(1): 2'-O-methyl
  misc_feature (2)..(2): 2'-deoxy-2'-fluoro
  misc_feature (3)..(6): 2'-O-methyl
  misc_feature (7)..(7): 2'-deoxy-2'-fluoro
  misc_feature (8)..(9): 2'-O-methyl
  misc_feature (10)..(10): 2'-deoxy-2'-fluoro
  misc_feature (11)..(12): 2'-O-methyl
  misc_feature (13)..(13): 2'-deoxy-2'-fluoro
  misc_feature (14)..(14): 2'-O-methyl
  misc_feature (15)..(15): 2'-deoxy-2'-fluoro
  misc_feature (16)..(17): 2'-O-methyl
  misc_feature (18)..(19): 2'-deoxy-2'-fluoro
  misc_feature (20)..(20): Phosphorothioate 3'-Internucleotide Linkage
  misc_feature (21)..(21): n stands for thymidine
gcagagcggugauguaguunn

SEQ ID NO: 1556 - RNA, 21 nt, Artificial Sequence
  Description of Artificial Sequence:  siNA antisense region
  misc_feature (1)..(1): 2'-deoxy-2'-fluoro
  misc_feature (2)..(5): 2'-O-methyl
  misc_feature (6)..(7): 2'-deoxy-2'-fluoro
  misc_feature (8)..(9): 2'-O-methyl
  misc_feature (10)..(13): 2'-deoxy-2'-fluoro
  misc_feature (14)..(19): 2'-O-methyl
  misc_feature (20)..(20): Phosphorothioate 3'-Internucleotide Linkage
  misc_feature (21)..(21): n stands for thymidine
cagagucagccccaaaagann

SEQ ID NO: 1557 - RNA, 21 nt, Artificial Sequence
  Description of Artificial Sequence:  siNA antisense region
  misc_feature (1)..(1): 2'-deoxy-2'-fluoro
  misc_feature (2)..(3): 2'-O-methyl
  misc_feature (4)..(7): 2'-deoxy-2'-fluoro
  misc_feature (8)..(8): 2'-O-methyl
  misc_feature (9)..(10): 2'-deoxy-2'-fluoro
  misc_feature (11)..(11): 2'-O-methyl
  misc_feature (12)..(14): 2'-deoxy-2'-fluoro
  misc_feature (15)..(16): 2'-O-methyl
  misc_feature (17)..(19): 2'-deoxy-2'-fluoro
  misc_feature (20)..(20): Phosphorothioate 3'-Internucleotide Linkage
  misc_feature (21)..(21): n stands for thymidine
ugguuuugcuguccaacuunn

SEQ ID NO: 1558 - RNA, 21 nt, Artificial Sequence
  Description of Artificial Sequence:  siNA antisense region
  misc_feature (1)..(1): 2'-O-methyl
  misc_feature (2)..(2): 2'-deoxy-2'-fluoro
  misc_feature (3)..(4): 2'-O-methyl
  misc_feature (5)..(8): 2'-deoxy-2'-fluoro
  misc_feature (9)..(9): 2'-O-methyl
  misc_feature (10)..(11): 2'-deoxy-2'-fluoro
  misc_feature (12)..(12): 2'-O-methyl
  misc_feature (13)..(15): 2'-deoxy-2'-fluoro
  misc_feature (16)..(17): 2'-O-methyl
  misc_feature (18)..(19): 2'-deoxy-2'-fluoro
  misc_feature (20)..(20): Phosphorothioate 3'-Internucleotide Linkage
  misc_feature (21)..(21): n stands for thymidine
augguuuugcuguccaacunn

SEQ ID NO: 1559 - RNA, 21 nt, Artificial Sequence
  Description of Artificial Sequence:  siNA sense region
  misc_feature (1)..(1): 5'-3 attached terminal deoxyabasic moeity
  misc_feature (20)..(20): n stands for thymidine
  misc_feature (21)..(21): 3'-3 attached terminal deoxyabasic moeity
gacuaugcagaugggagugnn

SEQ ID NO: 1560 - RNA, 21 nt, Artificial Sequence
  Description of Artificial Sequence:  siNA sense region
  misc_feature (1)..(1): 5'-3 attached terminal deoxyabasic moeity
  misc_feature (20)..(20): n stands for thymidine
  misc_feature (21)..(21): 3'-3 attached terminal deoxyabasic moeity
agcagaggaggaagaagugnn

SEQ ID NO: 1561 - RNA, 21 nt, Artificial Sequence
  Description of Artificial Sequence:  siNA sense region
  misc_feature (1)..(1): 5'-3 attached terminal deoxyabasic moeity
  misc_feature (20)..(20): n stands for thymidine
  misc_feature (21)..(21): 3'-3 attached terminal deoxyabasic moeity
gagguggaagaagaagaagnn

SEQ ID NO: 1562 - RNA, 21 nt, Artificial Sequence
  Description of Artificial Sequence:  siNA sense region
  misc_feature (1)..(1): 5'-3 attached terminal deoxyabasic moeity
  misc_feature (20)..(20): n stands for thymidine
  misc_feature (21)..(21): 3'-3 attached terminal deoxyabasic moeity
agagaaugucccaggucaunn

SEQ ID NO: 1563 - RNA, 21 nt, Artificial Sequence
  Description of Artificial Sequence:  siNA sense region
  misc_feature (1)..(1): 5'-3 attached terminal deoxyabasic moeity
  misc_feature (20)..(20): n stands for thymidine
  misc_feature (21)..(21): 3'-3 attached terminal deoxyabasic moeity
aacuacaucaccgcucugcnn

SEQ ID NO: 1564 - RNA, 21 nt, Artificial Sequence
  Description of Artificial Sequence:  siNA sense region
  misc_feature (1)..(1): 5'-3 attached terminal deoxyabasic moeity
  misc_feature (20)..(20): n stands for thymidine
  misc_feature (21)..(21): 3'-3 attached terminal deoxyabasic moeity
ucuuuuggggcugacucugnn

SEQ ID NO: 1565 - RNA, 21 nt, Artificial Sequence
  Description of Artificial Sequence:  siNA sense region
  misc_feature (1)..(1): 5'-3 attached terminal deoxyabasic moeity
  misc_feature (20)..(20): n stands for thymidine
  misc_feature (21)..(21): 3'-3 attached terminal deoxyabasic moeity
aaguuggacagcaaaaccann

SEQ ID NO: 1566 - RNA, 21 nt, Artificial Sequence
  Description of Artificial Sequence:  siNA sense region
  misc_feature (1)..(1): 5'-3 attached terminal deoxyabasic moeity
  misc_feature (20)..(20): n stands for thymidine
  misc_feature (21)..(21): 3'-3 attached terminal deoxyabasic moeity
aguuggacagcaaaaccaunn

SEQ ID NO: 1567 - RNA, 21 nt, Artificial Sequence
  Description of Artificial Sequence:  siNA antisense region
  misc_feature (20)..(20): Phosphorothioate 3'-Internucleotide Linkage
  misc_feature (21)..(21): n stands for thymidine
cacucccaucugcauagucnn

SEQ ID NO: 1568 - RNA, 21 nt, Artificial Sequence
  Description of Artificial Sequence:  siNA antisense region
  misc_feature (20)..(20): Phosphorothioate 3'-Internucleotide Linkage
  misc_feature (21)..(21): n stands for thymidine
cacuucuuccuccucugcunn

SEQ ID NO: 1569 - RNA, 21 nt, Artificial Sequence
  Description of Artificial Sequence:  siNA antisense region
  misc_feature (20)..(20): Phosphorothioate 3'-Internucleotide Linkage
  misc_feature (21)..(21): n stands for thymidine
cuucuucuucuuccaccucnn

SEQ ID NO: 1570 - RNA, 21 nt, Artificial Sequence
  Description of Artificial Sequence:  siNA antisense region
  misc_feature (20)..(20): Phosphorothioate 3'-Internucleotide Linkage
  misc_feature (21)..(21): n stands for thymidine
augaccugggacauucucunn

SEQ ID NO: 1571 - RNA, 21 nt, Artificial Sequence
  Description of Artificial Sequence:  siNA antisense region
  misc_feature (20)..(20): Phosphorothioate 3'-Internucleotide Linkage
  misc_feature (21)..(21): n stands for thymidine
gcagagcggugauguaguunn

SEQ ID NO: 1572 - RNA, 21 nt, Artificial Sequence
  Description of Artificial Sequence:  siNA antisense region
  misc_feature (20)..(20): Phosphorothioate 3'-Internucleotide Linkage
  misc_feature (21)..(21): n stands for thymidine
cagagucagccccaaaagann

SEQ ID NO: 1573 - RNA, 21 nt, Artificial Sequence
  Description of Artificial Sequence:  siNA antisense region
  misc_feature (20)..(20): Phosphorothioate 3'-Internucleotide Linkage
  misc_feature (21)..(21): n stands for thymidine
ugguuuugcuguccaacuunn

SEQ ID NO: 1574 - RNA, 21 nt, Artificial Sequence
  Description of Artificial Sequence:  siNA antisense region
  misc_feature (20)..(20): Phosphorothioate 3'-Internucleotide Linkage
  misc_feature (21)..(21): n stands for thymidine
augguuuugcuguccaacunn

SEQ ID NO: 1575 - RNA, 21 nt, Artificial Sequence
  Description of Artificial Sequence:  siNA antisense region
  misc_feature (1)..(1): 2'-deoxy-2'-fluoro
  misc_feature (2)..(2): 2'-O-methyl
  misc_feature (3)..(7): 2'-deoxy-2'-fluoro
  misc_feature (8)..(8): 2'-O-methyl
  misc_feature (9)..(11): 2'-deoxy-2'-fluoro
  misc_feature (12)..(12): 2'-O-methyl
  misc_feature (13)..(13): 2'-deoxy-2'-fluoro
  misc_feature (14)..(14): 2'-O-methyl
  misc_feature (15)..(15): 2'-deoxy-2'-fluoro
  misc_feature (16)..(17): 2'-O-methyl
  misc_feature (18)..(19): 2'-deoxy-2'-fluoro
  misc_feature (20)..(20): n stands for thymidine
  misc_feature (21)..(21): 3'-3 attached terminal deoxyabasic moeity
cacucccaucugcauagucnn

SEQ ID NO: 1576 - RNA, 21 nt, Artificial Sequence
  Description of Artificial Sequence:  siNA antisense region
  misc_feature (1)..(1): 2'-deoxy-2'-fluoro
  misc_feature (2)..(2): 2'-O-methyl
  misc_feature (3)..(16): 2'-deoxy-2'-fluoro
  misc_feature (17)..(17): 2'-O-methyl
  misc_feature (18)..(19): 2'-deoxy-2'-fluoro
  misc_feature (20)..(20): n stands for thymidine
  misc_feature (21)..(21): 3'-3 attached terminal deoxyabasic moeity
cacuucuuccuccucugcunn

SEQ ID NO: 1577 - RNA, 21 nt, Artificial Sequence
  Description of Artificial Sequence:  siNA antisense region
  misc_feature (1)..(14): 2'-deoxy-2'-fluoro
  misc_feature (15)..(15): 2'-O-methyl
  misc_feature (16)..(19): 2'-deoxy-2'-fluoro
  misc_feature (20)..(20): n stands for thymidine
  misc_feature (21)..(21): 3'-3 attached terminal deoxyabasic moeity
cuucuucuucuuccaccucnn

SEQ ID NO: 1578 - RNA, 21 nt, Artificial Sequence
  Description of Artificial Sequence:  siNA antisense region
  misc_feature (1)..(1): 2'-O-methyl
  misc_feature (2)..(2): 2'-deoxy-2'-fluoro
  misc_feature (3)..(4): 2'-O-methyl
  misc_feature (5)..(7): 2'-deoxy-2'-fluoro
  misc_feature (8)..(11): 2'-O-methyl
  misc_feature (12)..(12): 2'-deoxy-2'-fluoro
  misc_feature (13)..(13): 2'-O-methyl
  misc_feature (14)..(19): 2'-deoxy-2'-fluoro
  misc_feature (20)..(20): n stands for thymidine
  misc_feature (21)..(21): 3'-3 attached terminal deoxyabasic moeity
augaccugggacauucucunn

SEQ ID NO: 1579 - RNA, 21 nt, Artificial Sequence
  Description of Artificial Sequence:  siNA antisense region
  misc_feature (1)..(1): 2'-O-methyl
  misc_feature (2)..(2): 2'-deoxy-2'-fluoro
  misc_feature (3)..(6): 2'-O-methyl
  misc_feature (7)..(7): 2'-deoxy-2'-fluoro
  misc_feature (8)..(9): 2'-O-methyl
  misc_feature (10)..(10): 2'-deoxy-2'-fluoro
  misc_feature (11)..(12): 2'-O-methyl
  misc_feature (13)..(13): 2'-deoxy-2'-fluoro
  misc_feature (14)..(14): 2'-O-methyl
  misc_feature (15)..(15): 2'-deoxy-2'-fluoro
  misc_feature (16)..(17): 2'-O-methyl
  misc_feature (18)..(19): 2'-deoxy-2'-fluoro
  misc_feature (20)..(20): n stands for thymidine
  misc_feature (21)..(21): 3'-3 attached terminal deoxyabasic moeity
gcagagcggugauguaguunn

SEQ ID NO: 1580 - RNA, 21 nt, Artificial Sequence
  Description of Artificial Sequence:  siNA antisense region
  misc_feature (1)..(1): 2'-deoxy-2'-fluoro
  misc_feature (2)..(5): 2'-O-methyl
  misc_feature (6)..(7): 2'-deoxy-2'-fluoro
  misc_feature (8)..(9): 2'-O-methyl
  misc_feature (10)..(13): 2'-deoxy-2'-fluoro
  misc_feature (14)..(19): 2'-O-methyl
  misc_feature (20)..(20): n stands for thymidine
  misc_feature (21)..(21): 3'-3 attached terminal deoxyabasic moeity
cagagucagccccaaaagann

SEQ ID NO: 1581 - RNA, 21 nt, Artificial Sequence
  Description of Artificial Sequence:  siNA antisense region
  misc_feature (1)..(1): 2'-deoxy-2'-fluoro
  misc_feature (2)..(3): 2'-O-methyl
  misc_feature (4)..(7): 2'-deoxy-2'-fluoro
  misc_feature (8)..(8): 2'-O-methyl
  misc_feature (9)..(10): 2'-deoxy-2'-fluoro
  misc_feature (11)..(11): 2'-O-methyl
  misc_feature (12)..(14): 2'-deoxy-2'-fluoro
  misc_feature (15)..(16): 2'-O-methyl
  misc_feature (17)..(19): 2'-deoxy-2'-fluoro
  misc_feature (20)..(20): n stands for thymidine
  misc_feature (21)..(21): 3'-3 attached terminal deoxyabasic moeity
ugguuuugcuguccaacuunn

SEQ ID NO: 1582 - RNA, 21 nt, Artificial Sequence
  Description of Artificial Sequence:  siNA antisense region
  misc_feature (1)..(1): 2'-O-methyl
  misc_feature (2)..(2): 2'-deoxy-2'-fluoro
  misc_feature (3)..(4): 2'-O-methyl
  misc_feature (5)..(8): 2'-deoxy-2'-fluoro
  misc_feature (9)..(9): 2'-O-methyl
  misc_feature (10)..(11): 2'-deoxy-2'-fluoro
  misc_feature (12)..(12): 2'-O-methyl
  misc_feature (13)..(15): 2'-deoxy-2'-fluoro
  misc_feature (16)..(17): 2'-O-methyl
  misc_feature (18)..(19): 2'-deoxy-2'-fluoro
  misc_feature (20)..(20): n stands for thymidine
  misc_feature (21)..(21): 3'-3 attached terminal deoxyabasic moeity
augguuuugcuguccaacunn

SEQ ID NO: 1583 - RNA, 21 nt, Artificial Sequence
  Description of Artificial Sequence:  siNA antisense region
  misc_feature (20)..(20): n stands for thymidine
  misc_feature (21)..(21): 3'-3 attached terminal deoxyabasic moeity
cacucccaucugcauagucnn

SEQ ID NO: 1584 - RNA, 21 nt, Artificial Sequence
  Description of Artificial Sequence:  siNA antisense region
  misc_feature (20)..(20): n stands for thymidine
  misc_feature (21)..(21): 3'-3 attached terminal deoxyabasic moeity
cacuucuuccuccucugcunn

SEQ ID NO: 1585 - RNA, 21 nt, Artificial Sequence
  Description of Artificial Sequence:  siNA antisense region
  misc_feature (20)..(20): n stands for thymidine
  misc_feature (21)..(21): 3'-3 attached terminal deoxyabasic moeity
cuucuucuucuuccaccucnn

SEQ ID NO: 1586 - RNA, 21 nt, Artificial Sequence
  Description of Artificial Sequence:  siNA antisense region
  misc_feature (20)..(20): n stands for thymidine
  misc_feature (21)..(21): 3'-3 attached terminal deoxyabasic moeity
augaccugggacauucucunn

SEQ ID NO: 1587 - RNA, 21 nt, Artificial Sequence
  Description of Artificial Sequence:  siNA antisense region
  misc_feature (20)..(20): n stands for thymidine
  misc_feature (21)..(21): 3'-3 attached terminal deoxyabasic moeity
gcagagcggugauguaguunn

SEQ ID NO: 1588 - RNA, 21 nt, Artificial Sequence
  Description of Artificial Sequence:  siNA antisense region
  misc_feature (20)..(20): n stands for thymidine
  misc_feature (21)..(21): 3'-3 attached terminal deoxyabasic moeity
cagagucagccccaaaagann

SEQ ID NO: 1589 - RNA, 21 nt, Artificial Sequence
  Description of Artificial Sequence:  siNA antisense region
  misc_feature (20)..(20): n stands for thymidine
  misc_feature (21)..(21): 3'-3 attached terminal deoxyabasic moeity
ugguuuugcuguccaacuunn

SEQ ID NO: 1590 - RNA, 21 nt, Artificial Sequence
  Description of Artificial Sequence:  siNA antisense region
  misc_feature (20)..(20): n stands for thymidine
  misc_feature (21)..(21): 3'-3 attached terminal deoxyabasic moeity
augguuuugcuguccaacunn

SEQ ID NO: 1591 - RNA, 21 nt, Artificial Sequence
  Description of Artificial Sequence:  siNA sense region
  misc_feature (20)..(21): n stands for thymidine
uggagccuuucuuugacucnn

SEQ ID NO: 1592 - RNA, 21 nt, Artificial Sequence
  Description of Artificial Sequence:  siNA sense region
  misc_feature (20)..(21): n stands for thymidine
agccuuucuuugacucucunn

SEQ ID NO: 1593 - RNA, 21 nt, Artificial Sequence
  Description of Artificial Sequence:  siNA sense region
  misc_feature (20)..(21): n stands for thymidine
aaguucccugaugguuucunn

SEQ ID NO: 1594 - RNA, 21 nt, Artificial Sequence
  Description of Artificial Sequence:  siNA sense region
  misc_feature (20)..(21): n stands for thymidine
ugggugagguuaccaaccann

SEQ ID NO: 1595 - RNA, 21 nt, Artificial Sequence
  Description of Artificial Sequence:  siNA sense region
  misc_feature (20)..(21): n stands for thymidine
accuuggacauggaagacunn

SEQ ID NO: 1596 - RNA, 21 nt, Artificial Sequence
  Description of Artificial Sequence:  siNA sense region
  misc_feature (20)..(21): n stands for thymidine
aacccucaugaccauagccnn

SEQ ID NO: 1597 - RNA, 21 nt, Artificial Sequence
  Description of Artificial Sequence:  siNA sense region
  misc_feature (20)..(21): n stands for thymidine
uaacauuggugcaaagauunn

SEQ ID NO: 1598 - RNA, 21 nt, Artificial Sequence
  Description of Artificial Sequence:  siNA sense region
  misc_feature (20)..(21): n stands for thymidine
ugggaccugcuaaguguggnn

SEQ ID NO: 1599 - RNA, 21 nt, Artificial Sequence
  Description of Artificial Sequence:  siNA antisense region
  misc_feature (20)..(21): n stands for thymidine
gagucaaagaaaggcuccann

SEQ ID NO: 1600 - RNA, 21 nt, Artificial Sequence
  Description of Artificial Sequence:  siNA antisense region
  misc_feature (20)..(21): n stands for thymidine
agagagucaaagaaaggcunn

SEQ ID NO: 1601 - RNA, 21 nt, Artificial Sequence
  Description of Artificial Sequence:  siNA antisense region
  misc_feature (20)..(21): n stands for thymidine
agaaaccaucagggaacuunn

SEQ ID NO: 1602 - RNA, 21 nt, Artificial Sequence
  Description of Artificial Sequence:  siNA antisense region
  misc_feature (20)..(21): n stands for thymidine
ugguugguaaccucacccann

SEQ ID NO: 1603 - RNA, 21 nt, Artificial Sequence
  Description of Artificial Sequence:  siNA antisense region
  misc_feature (20)..(21): n stands for thymidine
agucuuccauguccaaggunn

SEQ ID NO: 1604 - RNA, 21 nt, Artificial Sequence
  Description of Artificial Sequence:  siNA antisense region
  misc_feature (20)..(21): n stands for thymidine
ggcuauggucaugaggguunn

SEQ ID NO: 1605 - RNA, 21 nt, Artificial Sequence
  Description of Artificial Sequence:  siNA antisense region
  misc_feature (20)..(21): n stands for thymidine
aaucuuugcaccaauguuann

SEQ ID NO: 1606 - RNA, 21 nt, Artificial Sequence
  Description of Artificial Sequence:  siNA antisense region
  misc_feature (20)..(21): n stands for thymidine
ccacacuuagcaggucccann

SEQ ID NO: 1607 - RNA, 21 nt, Artificial Sequence
  Description of Artificial Sequence:  siNA sense region
  misc_feature (1)..(1): 5'-3 attached terminal deoxyabasic moeity
  misc_feature (1)..(1): 2'-deoxy-2'-fluoro
  misc_feature (6)..(14): 2'-deoxy-2'-fluoro
  misc_feature (17)..(19): 2'-deoxy-2'-fluoro
  misc_feature (20)..(20): n stands for thymidine
  misc_feature (21)..(21): 3'-3 attached terminal deoxyabasic moeity
uggagccuuucuuugacucnn

SEQ ID NO: 1608 - RNA, 21 nt, Artificial Sequence
  Description of Artificial Sequence:  siNA sense region
  misc_feature (1)..(1): 5'-3 attached terminal deoxyabasic moeity
  misc_feature (3)..(11): 2'-deoxy-2'-fluoro
  misc_feature (14)..(19): 2'-deoxy-2'-fluoro
  misc_feature (20)..(20): n stands for thymidine
  misc_feature (21)..(21): 3'-3 attached terminal deoxyabasic moeity
agccuuucuuugacucucunn

SEQ ID NO: 1609 - RNA, 21 nt, Artificial Sequence
  Description of Artificial Sequence:  siNA sense region
  misc_feature (1)..(1): 5'-3 attached terminal deoxyabasic moeity
  misc_feature (4)..(9): 2'-deoxy-2'-fluoro
  misc_feature (12)..(12): 2'-deoxy-2'-fluoro
  misc_feature (15)..(19): 2'-deoxy-2'-fluoro
  misc_feature (20)..(20): n stands for thymidine
  misc_feature (21)..(21): 3'-3 attached terminal deoxyabasic moeity
aaguucccugaugguuucunn

SEQ ID NO: 1610 - RNA, 21 nt, Artificial Sequence
  Description of Artificial Sequence:  siNA sense region
  misc_feature (1)..(1): 5'-3 attached terminal deoxyabasic moeity
  misc_feature (1)..(1): 2'-deoxy-2'-fluoro
  misc_feature (5)..(5): 2'-deoxy-2'-fluoro
  misc_feature (10)..(11): 2'-deoxy-2'-fluoro
  misc_feature (13)..(14): 2'-deoxy-2'-fluoro
  misc_feature (17)..(18): 2'-deoxy-2'-fluoro
  misc_feature (20)..(20): n stands for thymidine
  misc_feature (21)..(21): 3'-3 attached terminal deoxyabasic moeity
ugggugagguuaccaaccann

SEQ ID NO: 1611 - RNA, 21 nt, Artificial Sequence
  Description of Artificial Sequence:  siNA sense region
  misc_feature (1)..(1): 5'-3 attached terminal deoxyabasic moeity
  misc_feature (2)..(5): 2'-deoxy-2'-fluoro
  misc_feature (9)..(9): 2'-deoxy-2'-fluoro
  misc_feature (11)..(11): 2'-deoxy-2'-fluoro
  misc_feature (18)..(19): 2'-deoxy-2'-fluoro
  misc_feature (20)..(20): n stands for thymidine
  misc_feature (21)..(21): 3'-3 attached terminal deoxyabasic moeity
accuuggacauggaagacunn

SEQ ID NO: 1612 - RNA, 21 nt, Artificial Sequence
  Description of Artificial Sequence:  siNA sense region
  misc_feature (1)..(1): 5'-3 attached terminal deoxyabasic moeity
  misc_feature (3)..(7): 2'-deoxy-2'-fluoro
  misc_feature (9)..(9): 2'-deoxy-2'-fluoro
  misc_feature (12)..(13): 2'-deoxy-2'-fluoro
  misc_feature (15)..(15): 2'-deoxy-2'-fluoro
  misc_feature (18)..(19): 2'-deoxy-2'-fluoro
  misc_feature (20)..(20): n stands for thymidine
  misc_feature (21)..(21): 3'-3 attached terminal deoxyabasic moeity
aacccucaugaccauagccnn

SEQ ID NO: 1613 - RNA, 21 nt, Artificial Sequence
  Description of Artificial Sequence:  siNA sense region
  misc_feature (1)..(1): 5'-3 attached terminal deoxyabasic moeity
  misc_feature (1)..(1): 2'-deoxy-2'-fluoro
  misc_feature (4)..(4): 2'-deoxy-2'-fluoro
  misc_feature (6)..(7): 2'-deoxy-2'-fluoro
  misc_feature (10)..(10): 2'-deoxy-2'-fluoro
  misc_feature (12)..(12): 2'-deoxy-2'-fluoro
  misc_feature (18)..(19): 2'-deoxy-2'-fluoro
  misc_feature (20)..(20): n stands for thymidine
  misc_feature (21)..(21): 3'-3 attached terminal deoxyabasic moeity
uaacauuggugcaaagauunn

SEQ ID NO: 1614 - RNA, 21 nt, Artificial Sequence
  Description of Artificial Sequence:  siNA sense region
  misc_feature (1)..(1): 5'-3 attached terminal deoxyabasic moeity
  misc_feature (1)..(1): 2'-deoxy-2'-fluoro
  misc_feature (6)..(8): 2'-deoxy-2'-fluoro
  misc_feature (10)..(11): 2'-deoxy-2'-fluoro
  misc_feature (15)..(15): 2'-deoxy-2'-fluoro
  misc_feature (17)..(17): 2'-deoxy-2'-fluoro
  misc_feature (20)..(20): n stands for thymidine
  misc_feature (21)..(21): 3'-3 attached terminal deoxyabasic moeity
ugggaccugcuaaguguggnn

SEQ ID NO: 1615 - RNA, 21 nt, Artificial Sequence
  Description of Artificial Sequence:  siNA antisense region
  misc_feature (4)..(5): 2'-deoxy-2'-fluoro
  misc_feature (15)..(18): 2'-deoxy-2'-fluoro
  misc_feature (20)..(20): Phosphorothioate 3'-Internucleotide Linkage
  misc_feature (21)..(21): n stands for thymidine
gagucaaagaaaggcuccann

SEQ ID NO: 1616 - RNA, 21 nt, Artificial Sequence
  Description of Artificial Sequence:  siNA antisense region
  misc_feature (7)..(8): 2'-deoxy-2'-fluoro
  misc_feature (18)..(19): 2'-deoxy-2'-fluoro
  misc_feature (20)..(20): Phosphorothioate 3'-Internucleotide Linkage
  misc_feature (21)..(21): n stands for thymidine
agagagucaaagaaaggcunn

SEQ ID NO: 1617 - RNA, 21 nt, Artificial Sequence
  Description of Artificial Sequence:  siNA antisense region
  misc_feature (6)..(7): 2'-deoxy-2'-fluoro
  misc_feature (9)..(10): 2'-deoxy-2'-fluoro
  misc_feature (17)..(19): 2'-deoxy-2'-fluoro
  misc_feature (20)..(20): Phosphorothioate 3'-Internucleotide Linkage
  misc_feature (21)..(21): n stands for thymidine
agaaaccaucagggaacuunn

SEQ ID NO: 1618 - RNA, 21 nt, Artificial Sequence
  Description of Artificial Sequence:  siNA antisense region
  misc_feature (1)..(1): 2'-deoxy-2'-fluoro
  misc_feature (4)..(5): 2'-deoxy-2'-fluoro
  misc_feature (8)..(8): 2'-deoxy-2'-fluoro
  misc_feature (11)..(14): 2'-deoxy-2'-fluoro
  misc_feature (16)..(18): 2'-deoxy-2'-fluoro
  misc_feature (20)..(20): Phosphorothioate 3'-Internucleotide Linkage
  misc_feature (21)..(21): n stands for thymidine
ugguugguaaccucacccann

SEQ ID NO: 1619 - RNA, 21 nt, Artificial Sequence
  Description of Artificial Sequence:  siNA antisense region
  misc_feature (3)..(8): 2'-deoxy-2'-fluoro
  misc_feature (10)..(10): 2'-deoxy-2'-fluoro
  misc_feature (12)..(14): 2'-deoxy-2'-fluoro
  misc_feature (19)..(19): 2'-deoxy-2'-fluoro
  misc_feature (20)..(20): Phosphorothioate 3'-Internucleotide Linkage
  misc_feature (21)..(21): n stands for thymidine
agucuuccauguccaaggunn

SEQ ID NO: 1620 - RNA, 21 nt, Artificial Sequence
  Description of Artificial Sequence:  siNA antisense region
  misc_feature (3)..(4): 2'-deoxy-2'-fluoro
  misc_feature (6)..(6): 2'-deoxy-2'-fluoro
  misc_feature (9)..(10): 2'-deoxy-2'-fluoro
  misc_feature (12)..(12): 2'-deoxy-2'-fluoro
  misc_feature (18)..(19): 2'-deoxy-2'-fluoro
  misc_feature (20)..(20): Phosphorothioate 3'-Internucleotide Linkage
  misc_feature (21)..(21): n stands for thymidine
ggcuauggucaugaggguunn

SEQ ID NO: 1621 - RNA, 21 nt, Artificial Sequence
  Description of Artificial Sequence:  siNA antisense region
  misc_feature (3)..(7): 2'-deoxy-2'-fluoro
  misc_feature (9)..(9): 2'-deoxy-2'-fluoro
  misc_feature (11)..(12): 2'-deoxy-2'-fluoro
  misc_feature (15)..(15): 2'-deoxy-2'-fluoro
  misc_feature (17)..(18): 2'-deoxy-2'-fluoro
  misc_feature (20)..(20): Phosphorothioate 3'-Internucleotide Linkage
  misc_feature (21)..(21): n stands for thymidine
aaucuuugcaccaauguuann

SEQ ID NO: 1622 - RNA, 21 nt, Artificial Sequence
  Description of Artificial Sequence:  siNA antisense region
  misc_feature (1)..(2): 2'-deoxy-2'-fluoro
  misc_feature (4)..(4): 2'-deoxy-2'-fluoro
  misc_feature (6)..(8): 2'-deoxy-2'-fluoro
  misc_feature (11)..(11): 2'-deoxy-2'-fluoro
  misc_feature (15)..(18): 2'-deoxy-2'-fluoro
  misc_feature (20)..(20): Phosphorothioate 3'-Internucleotide Linkage
  misc_feature (21)..(21): n stands for thymidine
ccacacuuagcaggucccann

SEQ ID NO: 1623 - RNA, 21 nt, Artificial Sequence
  Description of Artificial Sequence:  siNA sense region
  misc_feature (1)..(1): 5'-3 attached terminal deoxyabasic moeity
  misc_feature (1)..(1): 2'-deoxy-2'-fluoro
  misc_feature (2)..(5): 2'-deoxy
  misc_feature (2)..(5): 2'-deoxy
  misc_feature (6)..(14): 2'-deoxy-2'-fluoro
  misc_feature (15)..(16): 2'-deoxy
  misc_feature (15)..(16): 2'-deoxy
  misc_feature (17)..(19): 2'-deoxy-2'-fluoro
  misc_feature (20)..(20): n stands for thymidine
  misc_feature (21)..(21): 3'-3 attached terminal deoxyabasic moeity
uggagccuuucuuugacucnn

SEQ ID NO: 1624 - RNA, 21 nt, Artificial Sequence
  Description of Artificial Sequence:  siNA sense region
  misc_feature (1)..(1): 5'-3 attached terminal deoxyabasic moeity
  misc_feature (1)..(2): 2'-deoxy
  misc_feature (1)..(2): 2'-deoxy
  misc_feature (3)..(11): 2'-deoxy-2'-fluoro
  misc_feature (12)..(13): 2'-deoxy
  misc_feature (12)..(13): 2'-deoxy
  misc_feature (14)..(19): 2'-deoxy-2'-fluoro
  misc_feature (20)..(20): n stands for thymidine
  misc_feature (21)..(21): 3'-3 attached terminal deoxyabasic moeity
agccuuucuuugacucucunn

SEQ ID NO: 1625 - RNA, 21 nt, Artificial Sequence
  Description of Artificial Sequence:  siNA sense region
  misc_feature (1)..(1): 5'-3 attached terminal deoxyabasic moeity
  misc_feature (1)..(3): 2'-deoxy
  misc_feature (1)..(3): 2'-deoxy
  misc_feature (4)..(9): 2'-deoxy-2'-fluoro
  misc_feature (10)..(11): 2'-deoxy
  misc_feature (10)..(11): 2'-deoxy
  misc_feature (12)..(12): 2'-deoxy-2'-fluoro
  misc_feature (13)..(14): 2'-deoxy
  misc_feature (13)..(14): 2'-deoxy
  misc_feature (15)..(19): 2'-deoxy-2'-fluoro
  misc_feature (20)..(20): n stands for thymidine
  misc_feature (21)..(21): 3'-3 attached terminal deoxyabasic moeity
aaguucccugaugguuucunn

SEQ ID NO: 1626 - RNA, 21 nt, Artificial Sequence
  Description of Artificial Sequence:  siNA sense region
  misc_feature (1)..(1): 5'-3 attached terminal deoxyabasic moeity
  misc_feature (1)..(1): 2'-deoxy-2'-fluoro
  misc_feature (2)..(4): 2'-deoxy
  misc_feature (2)..(4): 2'-deoxy
  misc_feature (5)..(5): 2'-deoxy-2'-fluoro
  misc_feature (6)..(9): 2'-deoxy
  misc_feature (6)..(9): 2'-deoxy
  misc_feature (10)..(11): 2'-deoxy-2'-fluoro
  misc_feature (12)..(12): 2'-deoxy
  misc_feature (12)..(12): 2'-deoxy
  misc_feature (13)..(14): 2'-deoxy-2'-fluoro
  misc_feature (15)..(16): 2'-deoxy
  misc_feature (15)..(16): 2'-deoxy
  misc_feature (17)..(18): 2'-deoxy-2'-fluoro
  misc_feature (19)..(19): 2'-deoxy
  misc_feature (19)..(19): 2'-deoxy
  misc_feature (20)..(20): n stands for thymidine
  misc_feature (21)..(21): 3'-3 attached terminal deoxyabasic moeity
ugggugagguuaccaaccann

SEQ ID NO: 1627 - RNA, 21 nt, Artificial Sequence
  Description of Artificial Sequence:  siNA sense region
  misc_feature (1)..(1): 5'-3 attached terminal deoxyabasic moeity
  misc_feature (1)..(1): 2'-deoxy
  misc_feature (1)..(1): 2'-deoxy
  misc_feature (2)..(5): 2'-deoxy-2'-fluoro
  misc_feature (6)..(8): 2'-deoxy
  misc_feature (6)..(8): 2'-deoxy
  misc_feature (9)..(9): 2'-deoxy-2'-fluoro
  misc_feature (10)..(10): 2'-deoxy
  misc_feature (10)..(10): 2'-deoxy
  misc_feature (11)..(11): 2'-deoxy-2'-fluoro
  misc_feature (12)..(17): 2'-deoxy
  misc_feature (12)..(17): 2'-deoxy
  misc_feature (18)..(19): 2'-deoxy-2'-fluoro
  misc_feature (20)..(20): n stands for thymidine
  misc_feature (21)..(21): 3'-3 attached terminal deoxyabasic moeity
accuuggacauggaagacunn

SEQ ID NO: 1628 - RNA, 21 nt, Artificial Sequence
  Description of Artificial Sequence:  siNA sense region
  misc_feature (1)..(1): 5'-3 attached terminal deoxyabasic moeity
  misc_feature (1)..(2): 2'-deoxy
  misc_feature (1)..(2): 2'-deoxy
  misc_feature (3)..(7): 2'-deoxy-2'-fluoro
  misc_feature (8)..(8): 2'-deoxy
  misc_feature (8)..(8): 2'-deoxy
  misc_feature (9)..(9): 2'-deoxy-2'-fluoro
  misc_feature (10)..(11): 2'-deoxy
  misc_feature (10)..(11): 2'-deoxy
  misc_feature (12)..(13): 2'-deoxy-2'-fluoro
  misc_feature (14)..(14): 2'-deoxy
  misc_feature (14)..(14): 2'-deoxy
  misc_feature (15)..(15): 2'-deoxy-2'-fluoro
  misc_feature (16)..(17): 2'-deoxy
  misc_feature (16)..(17): 2'-deoxy
  misc_feature (18)..(19): 2'-deoxy-2'-fluoro
  misc_feature (20)..(20): n stands for thymidine
  misc_feature (21)..(21): 3'-3 attached terminal deoxyabasic moeity
aacccucaugaccauagccnn

SEQ ID NO: 1629 - RNA, 21 nt, Artificial Sequence
  Description of Artificial Sequence:  siNA sense region
  misc_feature (1)..(1): 5'-3 attached terminal deoxyabasic moeity
  misc_feature (1)..(1): 2'-deoxy-2'-fluoro
  misc_feature (2)..(3): 2'-deoxy
  misc_feature (2)..(3): 2'-deoxy
  misc_feature (4)..(4): 2'-deoxy-2'-fluoro
  misc_feature (5)..(5): 2'-deoxy
  misc_feature (5)..(5): 2'-deoxy
  misc_feature (6)..(7): 2'-deoxy-2'-fluoro
  misc_feature (8)..(9): 2'-deoxy
  misc_feature (8)..(9): 2'-deoxy
  misc_feature (10)..(10): 2'-deoxy-2'-fluoro
  misc_feature (11)..(11): 2'-deoxy
  misc_feature (11)..(11): 2'-deoxy
  misc_feature (12)..(12): 2'-deoxy-2'-fluoro
  misc_feature (13)..(17): 2'-deoxy
  misc_feature (13)..(17): 2'-deoxy
  misc_feature (18)..(19): 2'-deoxy-2'-fluoro
  misc_feature (20)..(20): n stands for thymidine
  misc_feature (21)..(21): 3'-3 attached terminal deoxyabasic moeity
uaacauuggugcaaagauunn

SEQ ID NO: 1630 - RNA, 21 nt, Artificial Sequence
  Description of Artificial Sequence:  siNA sense region
  misc_feature (1)..(1): 5'-3 attached terminal deoxyabasic moeity
  misc_feature (1)..(1): 2'-deoxy-2'-fluoro
  misc_feature (2)..(5): 2'-deoxy
  misc_feature (2)..(5): 2'-deoxy
  misc_feature (6)..(8): 2'-deoxy-2'-fluoro
  misc_feature (9)..(9): 2'-deoxy
  misc_feature (9)..(9): 2'-deoxy
  misc_feature (10)..(11): 2'-deoxy-2'-fluoro
  misc_feature (12)..(14): 2'-deoxy
  misc_feature (12)..(14): 2'-deoxy
  misc_feature (15)..(15): 2'-deoxy-2'-fluoro
  misc_feature (16)..(16): 2'-deoxy
  misc_feature (16)..(16): 2'-deoxy
  misc_feature (17)..(17): 2'-deoxy-2'-fluoro
  misc_feature (18)..(19): 2'-deoxy
  misc_feature (18)..(19): 2'-deoxy
  misc_feature (20)..(20): n stands for thymidine
  misc_feature (21)..(21): 3'-3 attached terminal deoxyabasic moeity
ugggaccugcuaaguguggnn

SEQ ID NO: 1631 - RNA, 21 nt, Artificial Sequence
  Description of Artificial Sequence:  siNA antisense region
  misc_feature (1)..(3): 2'-deoxy
  misc_feature (1)..(3): 2'-deoxy
  misc_feature (4)..(5): 2'-deoxy-2'-fluoro
  misc_feature (6)..(14): 2'-deoxy
  misc_feature (6)..(14): 2'-deoxy
  misc_feature (15)..(18): 2'-deoxy-2'-fluoro
  misc_feature (19)..(19): 2'-deoxy
  misc_feature (19)..(19): 2'-deoxy
  misc_feature (20)..(20): Phosphorothioate 3'-Internucleotide Linkage
  misc_feature (21)..(21): n stands for thymidine
gagucaaagaaaggcuccann

SEQ ID NO: 1632 - RNA, 21 nt, Artificial Sequence
  Description of Artificial Sequence:  siNA antisense region
  misc_feature (1)..(6): 2'-deoxy
  misc_feature (1)..(6): 2'-deoxy
  misc_feature (7)..(8): 2'-deoxy-2'-fluoro
  misc_feature (9)..(17): 2'-deoxy
  misc_feature (9)..(17): 2'-deoxy
  misc_feature (18)..(19): 2'-deoxy-2'-fluoro
  misc_feature (20)..(20): Phosphorothioate 3'-Internucleotide Linkage
  misc_feature (21)..(21): n stands for thymidine
agagagucaaagaaaggcunn

SEQ ID NO: 1633 - RNA, 21 nt, Artificial Sequence
  Description of Artificial Sequence:  siNA antisense region
  misc_feature (1)..(5): 2'-deoxy
  misc_feature (1)..(5): 2'-deoxy
  misc_feature (6)..(7): 2'-deoxy-2'-fluoro
  misc_feature (8)..(8): 2'-deoxy
  misc_feature (8)..(8): 2'-deoxy
  misc_feature (9)..(10): 2'-deoxy-2'-fluoro
  misc_feature (11)..(16): 2'-deoxy
  misc_feature (11)..(16): 2'-deoxy
  misc_feature (17)..(19): 2'-deoxy-2'-fluoro
  misc_feature (20)..(20): Phosphorothioate 3'-Internucleotide Linkage
  misc_feature (21)..(21): n stands for thymidine
agaaaccaucagggaacuunn

SEQ ID NO: 1634 - RNA, 21 nt, Artificial Sequence
  Description of Artificial Sequence:  siNA antisense region
  misc_feature (1)..(1): 2'-deoxy-2'-fluoro
  misc_feature (2)..(3): 2'-deoxy
  misc_feature (2)..(3): 2'-deoxy
  misc_feature (4)..(5): 2'-deoxy-2'-fluoro
  misc_feature (6)..(7): 2'-deoxy
  misc_feature (6)..(7): 2'-deoxy
  misc_feature (8)..(8): 2'-deoxy-2'-fluoro
  misc_feature (9)..(10): 2'-deoxy
  misc_feature (9)..(10): 2'-deoxy
  misc_feature (11)..(14): 2'-deoxy-2'-fluoro
  misc_feature (15)..(15): 2'-deoxy
  misc_feature (15)..(15): 2'-deoxy
  misc_feature (16)..(18): 2'-deoxy-2'-fluoro
  misc_feature (19)..(19): 2'-deoxy
  misc_feature (19)..(19): 2'-deoxy
  misc_feature (20)..(20): Phosphorothioate 3'-Internucleotide Linkage
  misc_feature (21)..(21): n stands for thymidine
ugguugguaaccucacccann

SEQ ID NO: 1635 - RNA, 21 nt, Artificial Sequence
  Description of Artificial Sequence:  siNA antisense region
  misc_feature (1)..(2): 2'-deoxy
  misc_feature (1)..(2): 2'-deoxy
  misc_feature (3)..(8): 2'-deoxy-2'-fluoro
  misc_feature (9)..(9): 2'-deoxy
  misc_feature (9)..(9): 2'-deoxy
  misc_feature (10)..(10): 2'-deoxy-2'-fluoro
  misc_feature (11)..(11): 2'-deoxy
  misc_feature (11)..(11): 2'-deoxy
  misc_feature (12)..(14): 2'-deoxy-2'-fluoro
  misc_feature (15)..(18): 2'-deoxy
  misc_feature (15)..(18): 2'-deoxy
  misc_feature (19)..(19): 2'-deoxy-2'-fluoro
  misc_feature (20)..(20): Phosphorothioate 3'-Internucleotide Linkage
  misc_feature (21)..(21): n stands for thymidine
agucuuccauguccaaggunn

SEQ ID NO: 1636 - RNA, 21 nt, Artificial Sequence
  Description of Artificial Sequence:  siNA antisense region
  misc_feature (1)..(2): 2'-deoxy
  misc_feature (1)..(2): 2'-deoxy
  misc_feature (3)..(4): 2'-deoxy-2'-fluoro
  misc_feature (5)..(5): 2'-deoxy
  misc_feature (5)..(5): 2'-deoxy
  misc_feature (6)..(6): 2'-deoxy-2'-fluoro
  misc_feature (7)..(8): 2'-deoxy
  misc_feature (7)..(8): 2'-deoxy
  misc_feature (9)..(10): 2'-deoxy-2'-fluoro
  misc_feature (11)..(11): 2'-deoxy
  misc_feature (11)..(11): 2'-deoxy
  misc_feature (12)..(12): 2'-deoxy-2'-fluoro
  misc_feature (13)..(17): 2'-deoxy
  misc_feature (13)..(17): 2'-deoxy
  misc_feature (18)..(19): 2'-deoxy-2'-fluoro
  misc_feature (20)..(20): Phosphorothioate 3'-Internucleotide Linkage
  misc_feature (21)..(21): n stands for thymidine
ggcuauggucaugaggguunn

SEQ ID NO: 1637 - RNA, 21 nt, Artificial Sequence
  Description of Artificial Sequence:  siNA antisense region
  misc_feature (1)..(2): 2'-deoxy
  misc_feature (1)..(2): 2'-deoxy
  misc_feature (3)..(7): 2'-deoxy-2'-fluoro
  misc_feature (8)..(8): 2'-deoxy
  misc_feature (8)..(8): 2'-deoxy
  misc_feature (9)..(9): 2'-deoxy-2'-fluoro
  misc_feature (10)..(10): 2'-deoxy
  misc_feature (10)..(10): 2'-deoxy
  misc_feature (11)..(12): 2'-deoxy-2'-fluoro
  misc_feature (13)..(14): 2'-deoxy
  misc_feature (13)..(14): 2'-deoxy
  misc_feature (15)..(15): 2'-deoxy-2'-fluoro
  misc_feature (16)..(16): 2'-deoxy
  misc_feature (16)..(16): 2'-deoxy
  misc_feature (17)..(18): 2'-deoxy-2'-fluoro
  misc_feature (19)..(19): 2'-deoxy
  misc_feature (19)..(19): 2'-deoxy
  misc_feature (20)..(20): Phosphorothioate 3'-Internucleotide Linkage
  misc_feature (21)..(21): n stands for thymidine
aaucuuugcaccaauguuann

SEQ ID NO: 1638 - RNA, 21 nt, Artificial Sequence
  Description of Artificial Sequence:  siNA antisense region
  misc_feature (1)..(2): 2'-deoxy-2'-fluoro
  misc_feature (3)..(3): 2'-deoxy
  misc_feature (3)..(3): 2'-deoxy
  misc_feature (4)..(4): 2'-deoxy-2'-fluoro
  misc_feature (5)..(5): 2'-deoxy
  misc_feature (5)..(5): 2'-deoxy
  misc_feature (6)..(8): 2'-deoxy-2'-fluoro
  misc_feature (9)..(10): 2'-deoxy
  misc_feature (9)..(10): 2'-deoxy
  misc_feature (11)..(11): 2'-deoxy-2'-fluoro
  misc_feature (12)..(14): 2'-deoxy
  misc_feature (12)..(14): 2'-deoxy
  misc_feature (15)..(18): 2'-deoxy-2'-fluoro
  misc_feature (19)..(19): 2'-deoxy
  misc_feature (19)..(19): 2'-deoxy
  misc_feature (20)..(20): Phosphorothioate 3'-Internucleotide Linkage
  misc_feature (21)..(21): n stands for thymidine
ccacacuuagcaggucccann

SEQ ID NO: 1639 - RNA, 21 nt, Artificial Sequence
  Description of Artificial Sequence:  Target Sequence
  misc_feature (1)..(1): 5'-3 attached terminal deoxyabasic moeity
  misc_feature (1)..(1): 2'-deoxy-2'-fluoro
  misc_feature (2)..(5): 2'-O-methyl
  misc_feature (6)..(14): 2'-deoxy-2'-fluoro
  misc_feature (15)..(16): 2'-O-methyl
  misc_feature (17)..(19): 2'-deoxy-2'-fluoro
  misc_feature (20)..(20): n stands for thymidine
  misc_feature (21)..(21): 3'-3 attached terminal deoxyabasic moeity
uggagccuuucuuugacucnn

SEQ ID NO: 1640 - RNA, 21 nt, Artificial Sequence
  Description of Artificial Sequence:  Target Sequence
  misc_feature (1)..(1): 5'-3 attached terminal deoxyabasic moeity
  misc_feature (1)..(2): 2'-O-methyl
  misc_feature (3)..(11): 2'-deoxy-2'-fluoro
  misc_feature (12)..(13): 2'-O-methyl
  misc_feature (14)..(19): 2'-deoxy-2'-fluoro
  misc_feature (20)..(20): n stands for thymidine
  misc_feature (21)..(21): 3'-3 attached terminal deoxyabasic moeity
agccuuucuuugacucucunn

SEQ ID NO: 1641 - RNA, 21 nt, Artificial Sequence
  Description of Artificial Sequence:  Target Sequence
  misc_feature (1)..(1): 5'-3 attached terminal deoxyabasic moeity
  misc_feature (1)..(3): 2'-O-methyl
  misc_feature (4)..(9): 2'-deoxy-2'-fluoro
  misc_feature (10)..(11): 2'-O-methyl
  misc_feature (12)..(12): 2'-deoxy-2'-fluoro
  misc_feature (13)..(14): 2'-O-methyl
  misc_feature (15)..(19): 2'-deoxy-2'-fluoro
  misc_feature (20)..(20): n stands for thymidine
  misc_feature (21)..(21): 3'-3 attached terminal deoxyabasic moeity
aaguucccugaugguuucunn

SEQ ID NO: 1642 - RNA, 21 nt, Artificial Sequence
  Description of Artificial Sequence:  Target Sequence
  misc_feature (1)..(1): 5'-3 attached terminal deoxyabasic moeity
  misc_feature (1)..(1): 2'-deoxy-2'-fluoro
  misc_feature (2)..(4): 2'-O-methyl
  misc_feature (5)..(5): 2'-deoxy-2'-fluoro
  misc_feature (6)..(9): 2'-O-methyl
  misc_feature (10)..(11): 2'-deoxy-2'-fluoro
  misc_feature (12)..(12): 2'-O-methyl
  misc_feature (13)..(14): 2'-deoxy-2'-fluoro
  misc_feature (15)..(16): 2'-O-methyl
  misc_feature (17)..(18): 2'-deoxy-2'-fluoro
  misc_feature (19)..(19): 2'-O-methyl
  misc_feature (20)..(20): n stands for thymidine
  misc_feature (21)..(21): 3'-3 attached terminal deoxyabasic moeity
ugggugagguuaccaaccann

SEQ ID NO: 1643 - RNA, 21 nt, Artificial Sequence
  Description of Artificial Sequence:  Target Sequence
  misc_feature (1)..(1): 5'-3 attached terminal deoxyabasic moeity
  misc_feature (1)..(1): 2'-O-methyl
  misc_feature (2)..(5): 2'-deoxy-2'-fluoro
  misc_feature (6)..(8): 2'-O-methyl
  misc_feature (9)..(9): 2'-deoxy-2'-fluoro
  misc_feature (10)..(10): 2'-O-methyl
  misc_feature (11)..(11): 2'-deoxy-2'-fluoro
  misc_feature (12)..(17): 2'-O-methyl
  misc_feature (18)..(19): 2'-deoxy-2'-fluoro
  misc_feature (20)..(20): n stands for thymidine
  misc_feature (21)..(21): 3'-3 attached terminal deoxyabasic moeity
accuuggacauggaagacunn

SEQ ID NO: 1644 - RNA, 21 nt, Artificial Sequence
  Description of Artificial Sequence:  Target Sequence
  misc_feature (1)..(1): 5'-3 attached terminal deoxyabasic moeity
  misc_feature (1)..(2): 2'-O-methyl
  misc_feature (3)..(7): 2'-deoxy-2'-fluoro
  misc_feature (8)..(8): 2'-O-methyl
  misc_feature (9)..(9): 2'-deoxy-2'-fluoro
  misc_feature (10)..(11): 2'-O-methyl
  misc_feature (12)..(13): 2'-deoxy-2'-fluoro
  misc_feature (14)..(14): 2'-O-methyl
  misc_feature (15)..(15): 2'-deoxy-2'-fluoro
  misc_feature (16)..(17): 2'-O-methyl
  misc_feature (18)..(19): 2'-deoxy-2'-fluoro
  misc_feature (20)..(20): n stands for thymidine
  misc_feature (21)..(21): 3'-3 attached terminal deoxyabasic moeity
aacccucaugaccauagccnn

SEQ ID NO: 1645 - RNA, 21 nt, Artificial Sequence
  Description of Artificial Sequence:  Target Sequence
  misc_feature (1)..(1): 5'-3 attached terminal deoxyabasic moeity
  misc_feature (1)..(1): 2'-deoxy-2'-fluoro
  misc_feature (2)..(3): 2'-O-methyl
  misc_feature (4)..(4): 2'-deoxy-2'-fluoro
  misc_feature (5)..(5): 2'-O-methyl
  misc_feature (6)..(7): 2'-deoxy-2'-fluoro
  misc_feature (8)..(9): 2'-O-methyl
  misc_feature (10)..(10): 2'-deoxy-2'-fluoro
  misc_feature (11)..(11): 2'-O-methyl
  misc_feature (12)..(12): 2'-deoxy-2'-fluoro
  misc_feature (13)..(17): 2'-O-methyl
  misc_feature (18)..(19): 2'-deoxy-2'-fluoro
  misc_feature (20)..(20): n stands for thymidine
  misc_feature (21)..(21): 3'-3 attached terminal deoxyabasic moeity
uaacauuggugcaaagauunn

SEQ ID NO: 1646 - RNA, 21 nt, Artificial Sequence
  Description of Artificial Sequence:  Target Sequence
  misc_feature (1)..(1): 5'-3 attached terminal deoxyabasic moeity
  misc_feature (1)..(1): 2'-deoxy-2'-fluoro
  misc_feature (2)..(5): 2'-O-methyl
  misc_feature (6)..(8): 2'-deoxy-2'-fluoro
  misc_feature (9)..(9): 2'-O-methyl
  misc_feature (10)..(11): 2'-deoxy-2'-fluoro
  misc_feature (12)..(14): 2'-O-methyl
  misc_feature (15)..(15): 2'-deoxy-2'-fluoro
  misc_feature (16)..(16): 2'-O-methyl
  misc_feature (17)..(17): 2'-deoxy-2'-fluoro
  misc_feature (18)..(19): 2'-O-methyl
  misc_feature (20)..(20): n stands for thymidine
  misc_feature (21)..(21): 3'-3 attached terminal deoxyabasic moeity
ugggaccugcuaaguguggnn

SEQ ID NO: 1647 - RNA, 21 nt, Artificial Sequence
  Description of Artificial Sequence:  Target Sequence
  misc_feature (1)..(3): 2'-O-methyl
  misc_feature (4)..(5): 2'-deoxy-2'-fluoro
  misc_feature (6)..(14): 2'-O-methyl
  misc_feature (15)..(18): 2'-deoxy-2'-fluoro
  misc_feature (19)..(19): 2'-O-methyl
  misc_feature (20)..(20): Phosphorothioate 3'-Internucleotide Linkage
  misc_feature (21)..(21): n stands for thymidine
gagucaaagaaaggcuccann

SEQ ID NO: 1648 - RNA, 21 nt, Artificial Sequence
  Description of Artificial Sequence:  Target Sequence
  misc_feature (1)..(6): 2'-O-methyl
  misc_feature (7)..(8): 2'-deoxy-2'-fluoro
  misc_feature (9)..(17): 2'-O-methyl
  misc_feature (18)..(19): 2'-deoxy-2'-fluoro
  misc_feature (20)..(20): Phosphorothioate 3'-Internucleotide Linkage
  misc_feature (21)..(21): n stands for thymidine
agagagucaaagaaaggcunn

SEQ ID NO: 1649 - RNA, 21 nt, Artificial Sequence
  Description of Artificial Sequence:  Target Sequence
  misc_feature (1)..(5): 2'-O-methyl
  misc_feature (6)..(7): 2'-deoxy-2'-fluoro
  misc_feature (8)..(8): 2'-O-methyl
  misc_feature (9)..(10): 2'-deoxy-2'-fluoro
  misc_feature (11)..(16): 2'-O-methyl
  misc_feature (17)..(19): 2'-deoxy-2'-fluoro
  misc_feature (20)..(20): Phosphorothioate 3'-Internucleotide Linkage
  misc_feature (21)..(21): n stands for thymidine
agaaaccaucagggaacuunn

SEQ ID NO: 1650 - RNA, 21 nt, Artificial Sequence
  Description of Artificial Sequence:  Target Sequence
  misc_feature (1)..(1): 2'-deoxy-2'-fluoro
  misc_feature (2)..(3): 2'-O-methyl
  misc_feature (4)..(5): 2'-deoxy-2'-fluoro
  misc_feature (6)..(7): 2'-O-methyl
  misc_feature (8)..(8): 2'-deoxy-2'-fluoro
  misc_feature (9)..(10): 2'-O-methyl
  misc_feature (11)..(14): 2'-deoxy-2'-fluoro
  misc_feature (15)..(15): 2'-O-methyl
  misc_feature (16)..(18): 2'-deoxy-2'-fluoro
  misc_feature (19)..(19): 2'-O-methyl
  misc_feature (20)..(20): Phosphorothioate 3'-Internucleotide Linkage
  misc_feature (21)..(21): n stands for thymidine
ugguugguaaccucacccann

SEQ ID NO: 1651 - RNA, 21 nt, Artificial Sequence
  Description of Artificial Sequence:  Target Sequence
  misc_feature (1)..(2): 2'-O-methyl
  misc_feature (3)..(8): 2'-deoxy-2'-fluoro
  misc_feature (9)..(9): 2'-O-methyl
  misc_feature (10)..(10): 2'-deoxy-2'-fluoro
  misc_feature (11)..(11): 2'-O-methyl
  misc_feature (12)..(14): 2'-deoxy-2'-fluoro
  misc_feature (15)..(18): 2'-O-methyl
  misc_feature (19)..(19): 2'-deoxy-2'-fluoro
  misc_feature (20)..(20): Phosphorothioate 3'-Internucleotide Linkage
  misc_feature (21)..(21): n stands for thymidine
agucuuccauguccaaggunn

SEQ ID NO: 1652 - RNA, 21 nt, Artificial Sequence
  Description of Artificial Sequence:  Target Sequence
  misc_feature (1)..(2): 2'-O-methyl
  misc_feature (3)..(4): 2'-deoxy-2'-fluoro
  misc_feature (5)..(5): 2'-O-methyl
  misc_feature (6)..(6): 2'-deoxy-2'-fluoro
  misc_feature (7)..(8): 2'-O-methyl
  misc_feature (9)..(10): 2'-deoxy-2'-fluoro
  misc_feature (11)..(11): 2'-O-methyl
  misc_feature (12)..(12): 2'-deoxy-2'-fluoro
  misc_feature (13)..(17): 2'-O-methyl
  misc_feature (18)..(19): 2'-deoxy-2'-fluoro
  misc_feature (20)..(20): Phosphorothioate 3'-Internucleotide Linkage
  misc_feature (21)..(21): n stands for thymidine
ggcuauggucaugaggguunn

SEQ ID NO: 1653 - RNA, 21 nt, Artificial Sequence
  Description of Artificial Sequence:  Target Sequence
  misc_feature (1)..(2): 2'-O-methyl
  misc_feature (3)..(7): 2'-deoxy-2'-fluoro
  misc_feature (8)..(8): 2'-O-methyl
  misc_feature (9)..(9): 2'-deoxy-2'-fluoro
  misc_feature (10)..(10): 2'-O-methyl
  misc_feature (11)..(12): 2'-deoxy-2'-fluoro
  misc_feature (13)..(14): 2'-O-methyl
  misc_feature (15)..(15): 2'-deoxy-2'-fluoro
  misc_feature (16)..(16): 2'-O-methyl
  misc_feature (17)..(18): 2'-deoxy-2'-fluoro
  misc_feature (19)..(19): 2'-O-methyl
  misc_feature (20)..(20): Phosphorothioate 3'-Internucleotide Linkage
  misc_feature (21)..(21): n stands for thymidine
aaucuuugcaccaauguuann

SEQ ID NO: 1654 - RNA, 21 nt, Artificial Sequence
  Description of Artificial Sequence:  Target Sequence
  misc_feature (1)..(2): 2'-deoxy-2'-fluoro
  misc_feature (3)..(3): 2'-O-methyl
  misc_feature (4)..(4): 2'-deoxy-2'-fluoro
  misc_feature (5)..(5): 2'-O-methyl
  misc_feature (6)..(8): 2'-deoxy-2'-fluoro
  misc_feature (9)..(10): 2'-O-methyl
  misc_feature (11)..(11): 2'-deoxy-2'-fluoro
  misc_feature (12)..(14): 2'-O-methyl
  misc_feature (15)..(18): 2'-deoxy-2'-fluoro
  misc_feature (19)..(19): 2'-O-methyl
  misc_feature (20)..(20): Phosphorothioate 3'-Internucleotide Linkage
  misc_feature (21)..(21): n stands for thymidine
ccacacuuagcaggucccann

SEQ ID NO: 1655 - RNA, 21 nt, Artificial Sequence
  Description of Artificial Sequence:  Target Sequence
  misc_feature (1)..(1): 5'-3 attached terminal deoxyabasic moeity
  misc_feature (20)..(20): n stands for thymidine
  misc_feature (21)..(21): 3'-3 attached terminal deoxyabasic moeity
uggagccuuucuuugacucnn

SEQ ID NO: 1656 - RNA, 21 nt, Artificial Sequence
  Description of Artificial Sequence:  Target Sequence
  misc_feature (1)..(1): 5'-3 attached terminal deoxyabasic moeity
  misc_feature (20)..(20): n stands for thymidine
  misc_feature (21)..(21): 3'-3 attached terminal deoxyabasic moeity
agccuuucuuugacucucunn

SEQ ID NO: 1657 - RNA, 21 nt, Artificial Sequence
  Description of Artificial Sequence:  Target Sequence
  misc_feature (1)..(1): 5'-3 attached terminal deoxyabasic moeity
  misc_feature (20)..(20): n stands for thymidine
  misc_feature (21)..(21): 3'-3 attached terminal deoxyabasic moeity
aaguucccugaugguuucunn

SEQ ID NO: 1658 - RNA, 21 nt, Artificial Sequence
  Description of Artificial Sequence:  Target Sequence
  misc_feature (1)..(1): 5'-3 attached terminal deoxyabasic moeity
  misc_feature (20)..(20): n stands for thymidine
  misc_feature (21)..(21): 3'-3 attached terminal deoxyabasic moeity
ugggugagguuaccaaccann

SEQ ID NO: 1659 - RNA, 21 nt, Artificial Sequence
  Description of Artificial Sequence:  Target Sequence
  misc_feature (1)..(1): 5'-3 attached terminal deoxyabasic moeity
  misc_feature (20)..(20): n stands for thymidine
  misc_feature (21)..(21): 3'-3 attached terminal deoxyabasic moeity
accuuggacauggaagacunn

SEQ ID NO: 1660 - RNA, 21 nt, Artificial Sequence
  Description of Artificial Sequence:  Target Sequence
  misc_feature (1)..(1): 5'-3 attached terminal deoxyabasic moeity
  misc_feature (20)..(20): n stands for thymidine
  misc_feature (21)..(21): 3'-3 attached terminal deoxyabasic moeity
aacccucaugaccauagccnn

SEQ ID NO: 1661 - RNA, 21 nt, Artificial Sequence
  Description of Artificial Sequence:  Target Sequence
  misc_feature (1)..(1): 5'-3 attached terminal deoxyabasic moeity
  misc_feature (20)..(20): n stands for thymidine
  misc_feature (21)..(21): 3'-3 attached terminal deoxyabasic moeity
uaacauuggugcaaagauunn

SEQ ID NO: 1662 - RNA, 21 nt, Artificial Sequence
  Description of Artificial Sequence:  Target Sequence
  misc_feature (1)..(1): 5'-3 attached terminal deoxyabasic moeity
  misc_feature (20)..(20): n stands for thymidine
  misc_feature (21)..(21): 3'-3 attached terminal deoxyabasic moeity
ugggaccugcuaaguguggnn

SEQ ID NO: 1663 - RNA, 21 nt, Artificial Sequence
  Description of Artificial Sequence:  Target Sequence
  misc_feature (20)..(20): Phosphorothioate 3'-Internucleotide Linkage
  misc_feature (21)..(21): n stands for thymidine
gagucaaagaaaggcuccann

SEQ ID NO: 1664 - RNA, 21 nt, Artificial Sequence
  Description of Artificial Sequence:  Target Sequence
  misc_feature (20)..(20): Phosphorothioate 3'-Internucleotide Linkage
  misc_feature (21)..(21): n stands for thymidine
agagagucaaagaaaggcunn

SEQ ID NO: 1665 - RNA, 21 nt, Artificial Sequence
  Description of Artificial Sequence:  Target Sequence
  misc_feature (20)..(20): Phosphorothioate 3'-Internucleotide Linkage
  misc_feature (21)..(21): n stands for thymidine
agaaaccaucagggaacuunn

SEQ ID NO: 1666 - RNA, 21 nt, Artificial Sequence
  Description of Artificial Sequence:  Target Sequence
  misc_feature (20)..(20): Phosphorothioate 3'-Internucleotide Linkage
  misc_feature (21)..(21): n stands for thymidine
ugguugguaaccucacccann

SEQ ID NO: 1667 - RNA, 21 nt, Artificial Sequence
  Description of Artificial Sequence:  Target Sequence
  misc_feature (20)..(20): Phosphorothioate 3'-Internucleotide Linkage
  misc_feature (21)..(21): n stands for thymidine
agucuuccauguccaaggunn

SEQ ID NO: 1668 - RNA, 21 nt, Artificial Sequence
  Description of Artificial Sequence:  Target Sequence
  misc_feature (20)..(20): Phosphorothioate 3'-Internucleotide Linkage
  misc_feature (21)..(21): n stands for thymidine
ggcuauggucaugaggguunn

SEQ ID NO: 1669 - RNA, 21 nt, Artificial Sequence
  Description of Artificial Sequence:  Target Sequence
  misc_feature (20)..(20): Phosphorothioate 3'-Internucleotide Linkage
  misc_feature (21)..(21): n stands for thymidine
aaucuuugcaccaauguuann

SEQ ID NO: 1670 - RNA, 21 nt, Artificial Sequence
  Description of Artificial Sequence:  Target Sequence
  misc_feature (20)..(20): Phosphorothioate 3'-Internucleotide Linkage
  misc_feature (21)..(21): n stands for thymidine
ccacacuuagcaggucccann

SEQ ID NO: 1671 - RNA, 21 nt, Artificial Sequence
  Description of Artificial Sequence:  Target Sequence
  misc_feature (1)..(3): 2'-O-methyl
  misc_feature (4)..(5): 2'-deoxy-2'-fluoro
  misc_feature (6)..(14): 2'-O-methyl
  misc_feature (15)..(18)
  misc_feature (19)..(19): 2'-O-methyl
  misc_feature (20)..(20): n stands for thymidine
  misc_feature (21)..(21): 3'-3 attached terminal deoxyabasic moeity
gagucaaagaaaggcuccann

SEQ ID NO: 1672 - RNA, 21 nt, Artificial Sequence
  Description of Artificial Sequence:  Target Sequence
  misc_feature (1)..(6): 2'-O-methyl
  misc_feature (7)..(8): 2'-deoxy-2'-fluoro
  misc_feature (9)..(17): 2'-O-methyl
  misc_feature (18)..(19): 2'-deoxy-2'-fluoro
  misc_feature (20)..(20): n stands for thymidine
  misc_feature (21)..(21): 3'-3 attached terminal deoxyabasic moeity
agagagucaaagaaaggcunn

SEQ ID NO: 1673 - RNA, 21 nt, Artificial Sequence
  Description of Artificial Sequence:  Target Sequence
  misc_feature (1)..(5): 2'-O-methyl
  misc_feature (6)..(7): 2'-deoxy-2'-fluoro
  misc_feature (8)..(8): 2'-O-methyl
  misc_feature (9)..(10): 2'-deoxy-2'-fluoro
  misc_feature (11)..(16): 2'-O-methyl
  misc_feature (17)..(19): 2'-deoxy-2'-fluoro
  misc_feature (20)..(20): n stands for thymidine
  misc_feature (21)..(21): 3'-3 attached terminal deoxyabasic moeity
agaaaccaucagggaacuunn

SEQ ID NO: 1674 - RNA, 21 nt, Artificial Sequence
  Description of Artificial Sequence:  Target Sequence
  misc_feature (1)..(1): 2'-deoxy-2'-fluoro
  misc_feature (2)..(3): 2'-O-methyl
  misc_feature (4)..(5): 2'-deoxy-2'-fluoro
  misc_feature (6)..(10): 2'-O-methyl
  misc_feature (8)..(8): 2'-deoxy-2'-fluoro
  misc_feature (11)..(14): 2'-deoxy-2'-fluoro
  misc_feature (15)..(15): 2'-O-methyl
  misc_feature (16)..(18): 2'-deoxy-2'-fluoro
  misc_feature (19)..(19): 2'-O-methyl
  misc_feature (20)..(20): n stands for thymidine
  misc_feature (21)..(21): 3'-3 attached terminal deoxyabasic moeity
ugguugguaaccucacccann

SEQ ID NO: 1675 - RNA, 21 nt, Artificial Sequence
  Description of Artificial Sequence:  Target Sequence
  misc_feature (1)..(2): 2'-O-methyl
  misc_feature (3)..(8): 2'-deoxy-2'-fluoro
  misc_feature (9)..(9): 2'-O-methyl
  misc_feature (10)..(10): 2'-deoxy-2'-fluoro
  misc_feature (11)..(11): 2'-O-methyl
  misc_feature (12)..(14): 2'-deoxy-2'-fluoro
  misc_feature (15)..(18): 2'-O-methyl
  misc_feature (19)..(19): 2'-deoxy-2'-fluoro
  misc_feature (20)..(20): n stands for thymidine
  misc_feature (21)..(21): 3'-3 attached terminal deoxyabasic moeity
agucuuccauguccaaggunn

SEQ ID NO: 1676 - RNA, 21 nt, Artificial Sequence
  Description of Artificial Sequence:  Target Sequence
  misc_feature (1)..(2): 2'-O-methyl
  misc_feature (3)..(4): 2'-deoxy-2'-fluoro
  misc_feature (5)..(5): 2'-O-methyl
  misc_feature (6)..(6): 2'-deoxy-2'-fluoro
  misc_feature (7)..(8): 2'-O-methyl
  misc_feature (9)..(10): 2'-deoxy-2'-fluoro
  misc_feature (11)..(11): 2'-O-methyl
  misc_feature (12)..(12): 2'-deoxy-2'-fluoro
  misc_feature (13)..(17): 2'-O-methyl
  misc_feature (18)..(19): 2'-deoxy-2'-fluoro
  misc_feature (20)..(20): n stands for thymidine
  misc_feature (21)..(21): 3'-3 attached terminal deoxyabasic moeity
ggcuauggucaugaggguunn

SEQ ID NO: 1677 - RNA, 21 nt, Artificial Sequence
  Description of Artificial Sequence:  Target Sequence
  misc_feature (1)..(2): 2'-O-methyl
  misc_feature (3)..(7): 2'-deoxy-2'-fluoro
  misc_feature (8)..(8): 2'-O-methyl
  misc_feature (9)..(9): 2'-deoxy-2'-fluoro
  misc_feature (10)..(10): 2'-O-methyl
  misc_feature (11)..(12): 2'-deoxy-2'-fluoro
  misc_feature (13)..(14): 2'-O-methyl
  misc_feature (15)..(15): 2'-deoxy-2'-fluoro
  misc_feature (16)..(16): 2'-O-methyl
  misc_feature (17)..(18): 2'-deoxy-2'-fluoro
  misc_feature (19)..(19): 2'-O-methyl
  misc_feature (20)..(20): n stands for thymidine
  misc_feature (21)..(21): 3'-3 attached terminal deoxyabasic moeity
aaucuuugcaccaauguuann

SEQ ID NO: 1678 - RNA, 21 nt, Artificial Sequence
  Description of Artificial Sequence:  Target Sequence
  misc_feature (1)..(2): 2'-deoxy-2'-fluoro
  misc_feature (3)..(3): 2'-O-methyl
  misc_feature (4)..(4): 2'-deoxy-2'-fluoro
  misc_feature (5)..(5): 2'-O-methyl
  misc_feature (6)..(8): 2'-deoxy-2'-fluoro
  misc_feature (9)..(10): 2'-O-methyl
  misc_feature (11)..(11): 2'-deoxy-2'-fluoro
  misc_feature (12)..(14): 2'-O-methyl
  misc_feature (15)..(18): 2'-deoxy-2'-fluoro
  misc_feature (19)..(19): 2'-O-methyl
  misc_feature (20)..(20): n stands for thymidine
  misc_feature (21)..(21): 3'-3 attached terminal deoxyabasic moeity
ccacacuuagcaggucccann

SEQ ID NO: 1679 - RNA, 21 nt, Artificial Sequence
  Description of Artificial Sequence:  Target Sequence
  misc_feature (20)..(20): n stands for thymidine
  misc_feature (21)..(21): 3'-3 attached terminal deoxyabasic moeity
gagucaaagaaaggcuccann

SEQ ID NO: 1680 - RNA, 21 nt, Artificial Sequence
  Description of Artificial Sequence:  Target Sequence
  misc_feature (20)..(20): n stands for thymidine
  misc_feature (21)..(21): 3'-3 attached terminal deoxyabasic moeity
agagagucaaagaaaggcunn

SEQ ID NO: 1681 - RNA, 21 nt, Artificial Sequence
  Description of Artificial Sequence:  Target Sequence
  misc_feature (20)..(20): n stands for thymidine
  misc_feature (21)..(21): 3'-3 attached terminal deoxyabasic moeity
agaaaccaucagggaacuunn

SEQ ID NO: 1682 - RNA, 21 nt, Artificial Sequence
  Description of Artificial Sequence:  Target Sequence
  misc_feature (20)..(20): n stands for thymidine
  misc_feature (21)..(21): 3'-3 attached terminal deoxyabasic moeity
ugguugguaaccucacccann

SEQ ID NO: 1683 - RNA, 21 nt, Artificial Sequence
  Description of Artificial Sequence:  Target Sequence
  misc_feature (20)..(20): n stands for thymidine
  misc_feature (21)..(21): 3'-3 attached terminal deoxyabasic moeity
agucuuccauguccaaggunn

SEQ ID NO: 1684 - RNA, 21 nt, Artificial Sequence
  Description of Artificial Sequence:  Target Sequence
  misc_feature (20)..(20): n stands for thymidine
  misc_feature (21)..(21): 3'-3 attached terminal deoxyabasic moeity
ggcuauggucaugaggguunn

SEQ ID NO: 1685 - RNA, 21 nt, Artificial Sequence
  Description of Artificial Sequence:  Target Sequence
  misc_feature (20)..(20): n stands for thymidine
  misc_feature (21)..(21): 3'-3 attached terminal deoxyabasic moeity
aaucuuugcaccaauguuann

SEQ ID NO: 1686 - RNA, 21 nt, Artificial Sequence
  Description of Artificial Sequence:  Target Sequence
  misc_feature (20)..(20): n stands for thymidine
  misc_feature (21)..(21): 3'-3 attached terminal deoxyabasic moeity
ccacacuuagcaggucccann

SEQ ID NO: 1687 - RNA, 21 nt, Artificial Sequence
  Description of Artificial Sequence:  Target Sequence
  misc_feature (1)..(2): 2'-deoxy-2'-fluoro
  misc_feature (8)..(8): 2'-deoxy-2'-fluoro
  misc_feature (10)..(10): 2'-deoxy-2'-fluoro
  misc_feature (13)..(14): 2'-deoxy-2'-fluoro
  misc_feature (16)..(16): 2'-deoxy-2'-fluoro
  misc_feature (19)..(19): 2'-deoxy-2'-fluoro
  misc_feature (20)..(20): n stands for thymidine
  misc_feature (21)..(21): 3'-3 attached terminal deoxyabasic moeity
uuagaaacgugguuacaaunn

SEQ ID NO: 1688 - RNA, 21 nt, Artificial Sequence
  Description of Artificial Sequence:  Target Sequence
  misc_feature (2)..(3): 2'-deoxy-2'-fluoro
  misc_feature (5)..(5): 2'-deoxy-2'-fluoro
  misc_feature (8)..(9): 2'-deoxy-2'-fluoro
  misc_feature (11)..(11): 2'-deoxy-2'-fluoro
  misc_feature (13)..(17): 2'-deoxy-2'-fluoro
  misc_feature (20)..(20): Phosphorothioate 3'-Internucleotide Linkage
  misc_feature (21)..(21): n stands for thymidine
auuguaaccacguuucuaann

SEQ ID NO: 1689 - RNA, 21 nt, Artificial Sequence
  Description of Artificial Sequence:  Target Sequence
  misc_feature (1)..(1): 5'-3 attached terminal deoxyabasic moeity
  misc_feature (1)..(2): 2'-deoxy-2'-fluoro
  misc_feature (3)..(7): 2'-deoxy
  misc_feature (8)..(8): 2'-deoxy-2'-fluoro
  misc_feature (9)..(9): 2'-deoxy
  misc_feature (10)..(10): 2'-deoxy-2'-fluoro
  misc_feature (11)..(12): 2'-deoxy
  misc_feature (13)..(14): 2'-deoxy-2'-fluoro
  misc_feature (15)..(15): 2'-deoxy
  misc_feature (16)..(16): 2'-deoxy-2'-fluoro
  misc_feature (17)..(18): 2'-deoxy
  misc_feature (19)..(19): 2'-deoxy-2'-fluoro
  misc_feature (20)..(20): n stands for thymidine
  misc_feature (21)..(21): 3'-3 attached terminal deoxyabasic moeity
uuagaaacgugguuacaaunn

SEQ ID NO: 1690 - RNA, 21 nt, Artificial Sequence
  Description of Artificial Sequence:  Target Sequence
  misc_feature (1)..(1): 2'-deoxy
  misc_feature (2)..(3): 2'-deoxy-2'-fluoro
  misc_feature (4)..(4): 2'-deoxy
  misc_feature (5)..(5): 2'-deoxy-2'-fluoro
  misc_feature (6)..(7): 2'-deoxy
  misc_feature (8)..(9): 2'-deoxy-2'-fluoro
  misc_feature (10)..(10): 2'-deoxy
  misc_feature (11)..(11): 2'-deoxy-2'-fluoro
  misc_feature (12)..(12): 2'-deoxy
  misc_feature (13)..(17): 2'-deoxy-2'-fluoro
  misc_feature (18)..(19): 2'-deoxy
  misc_feature (20)..(20): Phosphorothioate 3'-Internucleotide Linkage
  misc_feature (21)..(21): n stands for thymidine
auuguaaccacguuucuaann

SEQ ID NO: 1691 - RNA, 21 nt, Artificial Sequence
  Description of Artificial Sequence:  Target Sequence
  misc_feature (20)..(21): n stands for thymidine
aauggacgaccccaggguann

SEQ ID NO: 1692 - RNA, 21 nt, Artificial Sequence
  Description of Artificial Sequence:  Target Sequence
  misc_feature (20)..(21): n stands for thymidine
guugcacuccugaucuggann

SEQ ID NO: 1693 - RNA, 21 nt, Artificial Sequence
  Description of Artificial Sequence:  Target Sequence
  misc_feature (20)..(21): n stands for thymidine
aagcacagaaagggagucann

SEQ ID NO: 1694 - RNA, 21 nt, Artificial Sequence
  Description of Artificial Sequence:  Target Sequence
  misc_feature (20)..(21): n stands for thymidine
ggagucacaagacacuguunn

SEQ ID NO: 1695 - RNA, 21 nt, Artificial Sequence
  Description of Artificial Sequence:  Target Sequence
  misc_feature (20)..(21): n stands for thymidine
cuggaacacaaccauagccnn

SEQ ID NO: 1696 - RNA, 21 nt, Artificial Sequence
  Description of Artificial Sequence:  Target Sequence
  misc_feature (20)..(21): n stands for thymidine
gaacacaaccauagccugunn

SEQ ID NO: 1697 - RNA, 21 nt, Artificial Sequence
  Description of Artificial Sequence:  Target Sequence
  misc_feature (20)..(21): n stands for thymidine
accagauuugagggacgagnn

SEQ ID NO: 1698 - RNA, 21 nt, Artificial Sequence
  Description of Artificial Sequence:  Target Sequence
  misc_feature (20)..(21): n stands for thymidine
uaugcccaaagcgguagaann

SEQ ID NO: 1699 - RNA, 21 nt, Artificial Sequence
  Description of Artificial Sequence:  Target Sequence
  misc_feature (20)..(21): n stands for thymidine
uacccuggggucguccauunn

SEQ ID NO: 1700 - RNA, 21 nt, Artificial Sequence
  Description of Artificial Sequence:  Target Sequence
  misc_feature (20)..(21): n stands for thymidine
uccagaucaggagugcaacnn

SEQ ID NO: 1701 - RNA, 21 nt, Artificial Sequence
  Description of Artificial Sequence:  Target Sequence
  misc_feature (20)..(21): n stands for thymidine
ugacucccuuucugugcuunn

SEQ ID NO: 1702 - RNA, 21 nt, Artificial Sequence
  Description of Artificial Sequence:  Target Sequence
  misc_feature (20)..(21): n stands for thymidine
aacagugucuugugacuccnn

SEQ ID NO: 1703 - RNA, 21 nt, Artificial Sequence
  Description of Artificial Sequence:  Target Sequence
  misc_feature (20)..(21): n stands for thymidine
ggcuaugguuguguuccagnn

SEQ ID NO: 1704 - RNA, 21 nt, Artificial Sequence
  Description of Artificial Sequence:  Target Sequence
  misc_feature (20)..(21): n stands for thymidine
acaggcuaugguuguguucnn

SEQ ID NO: 1705 - RNA, 21 nt, Artificial Sequence
  Description of Artificial Sequence:  Target Sequence
  misc_feature (20)..(21): n stands for thymidine
cucgucccucaaaucuggunn

SEQ ID NO: 1706 - RNA, 21 nt, Artificial Sequence
  Description of Artificial Sequence:  Target Sequence
  misc_feature (20)..(21): n stands for thymidine
uucuaccgcuuugggcauann

SEQ ID NO: 1707 - RNA, 21 nt, Artificial Sequence
  Description of Artificial Sequence:  Target Sequence
  misc_feature (1)..(1): 5'-3 attached terminal deoxyabasic moeity
  misc_feature (3)..(3): 2'-deoxy-2'-fluoro
  misc_feature (7)..(7): 2'-deoxy-2'-fluoro
  misc_feature (10)..(13): 2'-deoxy-2'-fluoro
  misc_feature (18)..(18): 2'-deoxy-2'-fluoro
  misc_feature (20)..(20): n stands for thymidine
  misc_feature (21)..(21): 3'-3 attached terminal deoxyabasic moeity
aauggacgaccccaggguann

SEQ ID NO: 1708 - RNA, 21 nt, Artificial Sequence
  Description of Artificial Sequence:  Target Sequence
  misc_feature (1)..(1): 5'-3 attached terminal deoxyabasic moeity
  misc_feature (2)..(3): 2'-deoxy-2'-fluoro
  misc_feature (5)..(5): 2'-deoxy-2'-fluoro
  misc_feature (7)..(11): 2'-deoxy-2'-fluoro
  misc_feature (14)..(16): 2'-deoxy-2'-fluoro
  misc_feature (20)..(20): n stands for thymidine
  misc_feature (21)..(21): 3'-3 attached terminal deoxyabasic moeity
guugcacuccugaucuggann

SEQ ID NO: 1709 - RNA, 21 nt, Artificial Sequence
  Description of Artificial Sequence:  Target Sequence
  misc_feature (1)..(1): 5'-3 attached terminal deoxyabasic moeity
  misc_feature (4)..(4): 2'-deoxy-2'-fluoro
  misc_feature (6)..(6): 2'-deoxy-2'-fluoro
  misc_feature (17)..(18): 2'-deoxy-2'-fluoro
  misc_feature (20)..(20): n stands for thymidine
  misc_feature (21)..(21): 3'-3 attached terminal deoxyabasic moeity
aagcacagaaagggagucann

SEQ ID NO: 1710 - RNA, 21 nt, Artificial Sequence
  Description of Artificial Sequence:  Target Sequence
  misc_feature (1)..(1): 5'-3 attached terminal deoxyabasic moeity
  misc_feature (5)..(6): 2'-deoxy-2'-fluoro
  misc_feature (8)..(8): 2'-deoxy-2'-fluoro
  misc_feature (13)..(13): 2'-deoxy-2'-fluoro
  misc_feature (15)..(16): 2'-deoxy-2'-fluoro
  misc_feature (18)..(19): 2'-deoxy-2'-fluoro
  misc_feature (20)..(20): n stands for thymidine
  misc_feature (21)..(21): 3'-3 attached terminal deoxyabasic moeity
ggagucacaagacacuguunn

SEQ ID NO: 1711 - RNA, 21 nt, Artificial Sequence
  Description of Artificial Sequence:  Target Sequence
  misc_feature (1)..(1): 5'-3 attached terminal deoxyabasic moeity
  misc_feature (1)..(2): 2'-deoxy-2'-fluoro
  misc_feature (7)..(7): 2'-deoxy-2'-fluoro
  misc_feature (9)..(9): 2'-deoxy-2'-fluoro
  misc_feature (12)..(13): 2'-deoxy-2'-fluoro
  misc_feature (15)..(15): 2'-deoxy-2'-fluoro
  misc_feature (18)..(19): 2'-deoxy-2'-fluoro
  misc_feature (20)..(20): n stands for thymidine
  misc_feature (21)..(21): 3'-3 attached terminal deoxyabasic moeity
cuggaacacaaccauagccnn

SEQ ID NO: 1712 - RNA, 21 nt, Artificial Sequence
  Description of Artificial Sequence:  Target Sequence
  misc_feature (1)..(1): 5'-3 attached terminal deoxyabasic moeity
  misc_feature (4)..(4): 2'-deoxy-2'-fluoro
  misc_feature (6)..(6): 2'-deoxy-2'-fluoro
  misc_feature (9)..(10): 2'-deoxy-2'-fluoro
  misc_feature (12)..(12): 2'-deoxy-2'-fluoro
  misc_feature (15)..(17): 2'-deoxy-2'-fluoro
  misc_feature (19)..(19): 2'-deoxy-2'-fluoro
  misc_feature (20)..(20): n stands for thymidine
  misc_feature (21)..(21): 3'-3 attached terminal deoxyabasic moeity
gaacacaaccauagccugunn

SEQ ID NO: 1713 - RNA, 21 nt, Artificial Sequence
  Description of Artificial Sequence:  Target Sequence
  misc_feature: 2'-deoxy-2'-fluoro
  misc_feature (1)..(1): 5'-3 attached terminal deoxyabasic moeity
  misc_feature (2)..(3): 2'-deoxy-2'-fluoro
  misc_feature (7)..(9): 2'-deoxy-2'-fluoro
  misc_feature (16)..(16): 2'-deoxy-2'-fluoro
  misc_feature (20)..(20): n stands for thymidine
  misc_feature (21)..(21): 3'-3 attached terminal deoxyabasic moeity
accagauuugagggacgagnn

SEQ ID NO: 1714 - RNA, 21 nt, Artificial Sequence
  Description of Artificial Sequence:  Target Sequence
  misc_feature: 2'-deoxy-2'-fluoro
  misc_feature (1)..(1): 5'-3 attached terminal deoxyabasic moeity
  misc_feature (1)..(1): 2'-deoxy-2'-fluoro
  misc_feature (3)..(3): 2'-deoxy-2'-fluoro
  misc_feature (5)..(7): 2'-deoxy-2'-fluoro
  misc_feature (12)..(12): 2'-deoxy-2'-fluoro
  misc_feature (15)..(15): 2'-deoxy-2'-fluoro
  misc_feature (20)..(20): n stands for thymidine
  misc_feature (21)..(21): 3'-3 attached terminal deoxyabasic moeity
uaugcccaaagcgguagaann

SEQ ID NO: 1715 - RNA, 21 nt, Artificial Sequence
  Description of Artificial Sequence:  Target Sequence
  misc_feature (1)..(1): 2'-deoxy-2'-fluoro
  misc_feature (3)..(6): 2'-deoxy-2'-fluoro
  misc_feature (11)..(12): 2'-deoxy-2'-fluoro
  misc_feature (14)..(16): 2'-deoxy-2'-fluoro
  misc_feature (18)..(19): 2'-deoxy-2'-fluoro
  misc_feature (20)..(20): Phosphorothioate 3'-Internucleotide Linkage
  misc_feature (21)..(21): n stands for thymidine
uacccuggggucguccauunn

SEQ ID NO: 1716 - RNA, 21 nt, Artificial Sequence
  Description of Artificial Sequence:  Target Sequence
  misc_feature (1)..(3): 2'-deoxy-2'-fluoro
  misc_feature (7)..(8): 2'-deoxy-2'-fluoro
  misc_feature (14)..(14): 2'-deoxy-2'-fluoro
  misc_feature (16)..(16): 2'-deoxy-2'-fluoro
  misc_feature (19)..(19): 2'-deoxy-2'-fluoro
  misc_feature (20)..(20): Phosphorothioate 3'-Internucleotide Linkage
  misc_feature (21)..(21): n stands for thymidine
uccagaucaggagugcaacnn

SEQ ID NO: 1717 - RNA, 21 nt, Artificial Sequence
  Description of Artificial Sequence:  Target Sequence
  misc_feature (1)..(1): 2'-deoxy-2'-fluoro
  misc_feature (4)..(13): 2'-deoxy-2'-fluoro
  misc_feature (15)..(15): 2'-deoxy-2'-fluoro
  misc_feature (17)..(19): 2'-deoxy-2'-fluoro
  misc_feature (20)..(20): Phosphorothioate 3'-Internucleotide Linkage
  misc_feature (21)..(21): n stands for thymidine
ugacucccuuucugugcuunn

SEQ ID NO: 1718 - RNA, 21 nt, Artificial Sequence
  Description of Artificial Sequence:  Target Sequence
  misc_feature (3)..(3): 2'-deoxy-2'-fluoro
  misc_feature (6)..(6): 2'-deoxy-2'-fluoro
  misc_feature (8)..(11): 2'-deoxy-2'-fluoro
  misc_feature (13)..(13): 2'-deoxy-2'-fluoro
  misc_feature (16)..(19): 2'-deoxy-2'-fluoro
  misc_feature (20)..(20): Phosphorothioate 3'-Internucleotide Linkage
  misc_feature (21)..(21): n stands for thymidine
aacagugucuugugacuccnn

SEQ ID NO: 1719 - RNA, 21 nt, Artificial Sequence
  Description of Artificial Sequence:  Target Sequence
  misc_feature (3)..(4): 2'-deoxy-2'-fluoro
  misc_feature (6)..(6): 2'-deoxy-2'-fluoro
  misc_feature (9)..(10): 2'-deoxy-2'-fluoro
  misc_feature (12)..(12): 2'-deoxy-2'-fluoro
  misc_feature (14)..(17): 2'-deoxy-2'-fluoro
  misc_feature (20)..(20): Phosphorothioate 3'-Internucleotide Linkage
  misc_feature (21)..(21): n stands for thymidine
ggcuaugguuguguuccagnn

SEQ ID NO: 1720 - RNA, 21 nt, Artificial Sequence
  Description of Artificial Sequence:  Target Sequence
  misc_feature (2)..(2): 2'-deoxy-2'-fluoro
  misc_feature (6)..(7): 2'-deoxy-2'-fluoro
  misc_feature (9)..(9): 2'-deoxy-2'-fluoro
  misc_feature (12)..(13): 2'-deoxy-2'-fluoro
  misc_feature (15)..(15): 2'-deoxy-2'-fluoro
  misc_feature (17)..(19): 2'-deoxy-2'-fluoro
  misc_feature (20)..(20): Phosphorothioate 3'-Internucleotide Linkage
  misc_feature (21)..(21): n stands for thymidine
acaggcuaugguuguguucnn

SEQ ID NO: 1721 - RNA, 21 nt, Artificial Sequence
  Description of Artificial Sequence:  Target Sequence
  misc_feature (1)..(3): 2'-deoxy-2'-fluoro
  misc_feature (5)..(10): 2'-deoxy-2'-fluoro
  misc_feature (14)..(16): 2'-deoxy-2'-fluoro
  misc_feature (19)..(19): 2'-deoxy-2'-fluoro
  misc_feature (20)..(20): Phosphorothioate 3'-Internucleotide Linkage
  misc_feature (21)..(21): n stands for thymidine
cucgucccucaaaucuggunn

SEQ ID NO: 1722 - RNA, 21 nt, Artificial Sequence
  Description of Artificial Sequence:  Target Sequence
  misc_feature (1)..(4): 2'-deoxy-2'-fluoro
  misc_feature (6)..(7): 2'-deoxy-2'-fluoro
  misc_feature (9)..(12): 2'-deoxy-2'-fluoro
  misc_feature (16)..(16): 2'-deoxy-2'-fluoro
  misc_feature (18)..(18): 2'-deoxy-2'-fluoro
  misc_feature (20)..(20): Phosphorothioate 3'-Internucleotide Linkage
  misc_feature (21)..(21): n stands for thymidine
uucuaccgcuuugggcauann

SEQ ID NO: 1723 - RNA, 21 nt, Artificial Sequence
  Description of Artificial Sequence:  Target Sequence
  misc_feature (1)..(1): 5'-3 attached terminal deoxyabasic moeity
  misc_feature (1)..(2): 2'-deoxy
  misc_feature (3)..(3): 2'-deoxy-2'-fluoro
  misc_feature (4)..(6): 2'-deoxy
  misc_feature (7)..(7): 2'-deoxy-2'-fluoro
  misc_feature (8)..(9): 2'-deoxy
  misc_feature (10)..(13): 2'-deoxy-2'-fluoro
  misc_feature (14)..(17): 2'-deoxy
  misc_feature (18)..(18): 2'-deoxy-2'-fluoro
  misc_feature (19)..(19): 2'-deoxy
  misc_feature (20)..(20): n stands for thymidine
  misc_feature (21)..(21): 3'-3 attached terminal deoxyabasic moeity
aauggacgaccccaggguann

SEQ ID NO: 1724 - RNA, 21 nt, Artificial Sequence
  Description of Artificial Sequence:  Target Sequence
  misc_feature (1)..(1): 5'-3 attached terminal deoxyabasic moeity
  misc_feature (1)..(1): 2'-deoxy
  misc_feature (2)..(3): 2'-deoxy-2'-fluoro
  misc_feature (4)..(4): 2'-deoxy
  misc_feature (5)..(5): 2'-deoxy-2'-fluoro
  misc_feature (6)..(6): 2'-deoxy
  misc_feature (7)..(11): 2'-deoxy-2'-fluoro
  misc_feature (12)..(13): 2'-deoxy
  misc_feature (14)..(16): 2'-deoxy-2'-fluoro
  misc_feature (17)..(19): 2'-deoxy
  misc_feature (20)..(20): n stands for thymidine
  misc_feature (21)..(21): 3'-3 attached terminal deoxyabasic moeity
guugcacuccugaucuggann

SEQ ID NO: 1725 - RNA, 21 nt, Artificial Sequence
  Description of Artificial Sequence:  Target Sequence
  misc_feature (1)..(1): 5'-3 attached terminal deoxyabasic moeity
  misc_feature (1)..(3): 2'-deoxy
  misc_feature (4)..(4): 2'-deoxy-2'-fluoro
  misc_feature (5)..(5): 2'-deoxy
  misc_feature (6)..(6): 2'-deoxy-2'-fluoro
  misc_feature (7)..(16): 2'-deoxy
  misc_feature (17)..(18): 2'-deoxy-2'-fluoro
  misc_feature (19)..(19): 2'-deoxy
  misc_feature (20)..(20): n stands for thymidine
  misc_feature (21)..(21): 3'-3 attached terminal deoxyabasic moeity
aagcacagaaagggagucann

SEQ ID NO: 1726 - RNA, 21 nt, Artificial Sequence
  Description of Artificial Sequence:  Target Sequence
  misc_feature (1)..(1): 5'-3 attached terminal deoxyabasic moeity
  misc_feature (1)..(4): 2'-deoxy
  misc_feature (5)..(6): 2'-deoxy-2'-fluoro
  misc_feature (7)..(7): 2'-deoxy
  misc_feature (8)..(8): 2'-deoxy-2'-fluoro
  misc_feature (9)..(12): 2'-deoxy
  misc_feature (13)..(13): 2'-deoxy-2'-fluoro
  misc_feature (14)..(14): 2'-deoxy
  misc_feature (15)..(16): 2'-deoxy-2'-fluoro
  misc_feature (17)..(17): 2'-deoxy
  misc_feature (18)..(19): 2'-deoxy-2'-fluoro
  misc_feature (20)..(20): n stands for thymidine
  misc_feature (21)..(21): 3'-3 attached terminal deoxyabasic moeity
ggagucacaagacacuguunn

SEQ ID NO: 1727 - RNA, 21 nt, Artificial Sequence
  Description of Artificial Sequence:  Target Sequence
  misc_feature (1)..(1): 5'-3 attached terminal deoxyabasic moeity
  misc_feature (1)..(2): 2'-deoxy-2'-fluoro
  misc_feature (3)..(6): 2'-deoxy
  misc_feature (7)..(7): 2'-deoxy-2'-fluoro
  misc_feature (8)..(8): 2'-deoxy
  misc_feature (9)..(9): 2'-deoxy-2'-fluoro
  misc_feature (10)..(11): 2'-deoxy
  misc_feature (12)..(13): 2'-deoxy-2'-fluoro
  misc_feature (14)..(14): 2'-deoxy
  misc_feature (15)..(15): 2'-deoxy-2'-fluoro
  misc_feature (16)..(17): 2'-deoxy
  misc_feature (18)..(19): 2'-deoxy-2'-fluoro
  misc_feature (20)..(20): n stands for thymidine
  misc_feature (21)..(21): 3'-3 attached terminal deoxyabasic moeity
cuggaacacaaccauagccnn

SEQ ID NO: 1728 - RNA, 21 nt, Artificial Sequence
  Description of Artificial Sequence:  Target Sequence
  misc_feature (1)..(1): 5'-3 attached terminal deoxyabasic moeity
  misc_feature (1)..(3): 2'-deoxy
  misc_feature (4)..(4): 2'-deoxy-2'-fluoro
  misc_feature (5)..(5): 2'-deoxy
  misc_feature (6)..(6): 2'-deoxy-2'-fluoro
  misc_feature (7)..(8): 2'-deoxy
  misc_feature (9)..(10): 2'-deoxy-2'-fluoro
  misc_feature (11)..(11): 2'-deoxy
  misc_feature (12)..(12): 2'-deoxy-2'-fluoro
  misc_feature (13)..(14): 2'-deoxy
  misc_feature (15)..(17): 2'-deoxy-2'-fluoro
  misc_feature (18)..(18): 2'-deoxy
  misc_feature (19)..(19): 2'-deoxy-2'-fluoro
  misc_feature (20)..(20): n stands for thymidine
  misc_feature (21)..(21): 3'-3 attached terminal deoxyabasic moeity
gaacacaaccauagccugunn

SEQ ID NO: 1729 - RNA, 21 nt, Artificial Sequence
  Description of Artificial Sequence:  Target Sequence
  misc_feature: 2'-deoxy-2'-fluoro
  misc_feature (1)..(1): 5'-3 attached terminal deoxyabasic moeity
  misc_feature (1)..(1): 2'-deoxy
  misc_feature (2)..(3): 2'-deoxy-2'-fluoro
  misc_feature (4)..(6): 2'-deoxy
  misc_feature (7)..(9): 2'-deoxy-2'-fluoro
  misc_feature (10)..(15): 2'-deoxy
  misc_feature (16)..(16): 2'-deoxy-2'-fluoro
  misc_feature (17)..(19): 2'-deoxy
  misc_feature (20)..(20): n stands for thymidine
  misc_feature (21)..(21): 3'-3 attached terminal deoxyabasic moeity
accagauuugagggacgagnn

SEQ ID NO: 1730 - RNA, 21 nt, Artificial Sequence
  Description of Artificial Sequence:  Target Sequence
  misc_feature: 2'-deoxy-2'-fluoro
  misc_feature (1)..(1): 5'-3 attached terminal deoxyabasic moeity
  misc_feature (1)..(1): 2'-deoxy-2'-fluoro
  misc_feature (2)..(2): 2'-deoxy
  misc_feature (3)..(3): 2'-deoxy-2'-fluoro
  misc_feature (4)..(4): 2'-deoxy
  misc_feature (5)..(7): 2'-deoxy-2'-fluoro
  misc_feature (8)..(11): 2'-deoxy
  misc_feature (12)..(12): 2'-deoxy-2'-fluoro
  misc_feature (13)..(14): 2'-deoxy
  misc_feature (15)..(15): 2'-deoxy-2'-fluoro
  misc_feature (16)..(19): 2'-deoxy
  misc_feature (20)..(20): n stands for thymidine
  misc_feature (21)..(21): 3'-3 attached terminal deoxyabasic moeity
uaugcccaaagcgguagaann

SEQ ID NO: 1731 - RNA, 21 nt, Artificial Sequence
  Description of Artificial Sequence:  Target Sequence
  misc_feature (1)..(1): 2'-deoxy-2'-fluoro
  misc_feature (2)..(2): 2'-deoxy
  misc_feature (3)..(6): 2'-deoxy-2'-fluoro
  misc_feature (7)..(10): 2'-deoxy
  misc_feature (11)..(12): 2'-deoxy-2'-fluoro
  misc_feature (13)..(13): 2'-deoxy
  misc_feature (14)..(16): 2'-deoxy-2'-fluoro
  misc_feature (17)..(17): 2'-deoxy
  misc_feature (18)..(19): 2'-deoxy-2'-fluoro
  misc_feature (20)..(20): Phosphorothioate 3'-Internucleotide Linkage
  misc_feature (21)..(21): n stands for thymidine
uacccuggggucguccauunn

SEQ ID NO: 1732 - RNA, 21 nt, Artificial Sequence
  Description of Artificial Sequence:  Target Sequence
  misc_feature (1)..(3): 2'-deoxy-2'-fluoro
  misc_feature (4)..(6): 2'-deoxy
  misc_feature (7)..(8): 2'-deoxy-2'-fluoro
  misc_feature (9)..(13): 2'-deoxy
  misc_feature (14)..(14): 2'-deoxy-2'-fluoro
  misc_feature (15)..(15): 2'-deoxy
  misc_feature (16)..(16): 2'-deoxy-2'-fluoro
  misc_feature (17)..(18): 2'-deoxy
  misc_feature (19)..(19): 2'-deoxy-2'-fluoro
  misc_feature (20)..(20): Phosphorothioate 3'-Internucleotide Linkage
  misc_feature (21)..(21): n stands for thymidine
uccagaucaggagugcaacnn

SEQ ID NO: 1733 - RNA, 21 nt, Artificial Sequence
  Description of Artificial Sequence:  Target Sequence
  misc_feature (1)..(1): 2'-deoxy-2'-fluoro
  misc_feature (2)..(3): 2'-deoxy
  misc_feature (4)..(13): 2'-deoxy-2'-fluoro
  misc_feature (14)..(14): 2'-deoxy
  misc_feature (15)..(15): 2'-deoxy-2'-fluoro
  misc_feature (16)..(16): 2'-deoxy
  misc_feature (17)..(19): 2'-deoxy-2'-fluoro
  misc_feature (20)..(20): Phosphorothioate 3'-Internucleotide Linkage
  misc_feature (21)..(21): n stands for thymidine
ugacucccuuucugugcuunn

SEQ ID NO: 1734 - RNA, 21 nt, Artificial Sequence
  Description of Artificial Sequence:  Target Sequence
  misc_feature (1)..(2): 2'-deoxy
  misc_feature (3)..(3): 2'-deoxy-2'-fluoro
  misc_feature (4)..(5): 2'-deoxy
  misc_feature (6)..(6): 2'-deoxy-2'-fluoro
  misc_feature (7)..(7): 2'-deoxy
  misc_feature (8)..(11): 2'-deoxy-2'-fluoro
  misc_feature (12)..(12): 2'-deoxy
  misc_feature (13)..(13): 2'-deoxy-2'-fluoro
  misc_feature (14)..(15): 2'-deoxy
  misc_feature (16)..(19): 2'-deoxy-2'-fluoro
  misc_feature (20)..(20): Phosphorothioate 3'-Internucleotide Linkage
  misc_feature (21)..(21): n stands for thymidine
aacagugucuugugacuccnn

SEQ ID NO: 1735 - RNA, 21 nt, Artificial Sequence
  Description of Artificial Sequence:  Target Sequence
  misc_feature (1)..(2): 2'-deoxy
  misc_feature (3)..(4): 2'-deoxy-2'-fluoro
  misc_feature (5)..(5): 2'-deoxy
  misc_feature (6)..(6): 2'-deoxy-2'-fluoro
  misc_feature (7)..(8): 2'-deoxy
  misc_feature (9)..(10): 2'-deoxy-2'-fluoro
  misc_feature (11)..(11): 2'-deoxy
  misc_feature (12)..(12): 2'-deoxy-2'-fluoro
  misc_feature (13)..(13): 2'-deoxy
  misc_feature (14)..(17): 2'-deoxy-2'-fluoro
  misc_feature (18)..(19): 2'-deoxy
  misc_feature (20)..(20): Phosphorothioate 3'-Internucleotide Linkage
  misc_feature (21)..(21): n stands for thymidine
ggcuaugguuguguuccagnn

SEQ ID NO: 1736 - RNA, 21 nt, Artificial Sequence
  Description of Artificial Sequence:  Target Sequence
  misc_feature (1)..(1): 2'-deoxy
  misc_feature (2)..(2): 2'-deoxy-2'-fluoro
  misc_feature (3)..(5): 2'-deoxy
  misc_feature (6)..(7): 2'-deoxy-2'-fluoro
  misc_feature (8)..(8): 2'-deoxy
  misc_feature (9)..(9): 2'-deoxy-2'-fluoro
  misc_feature (10)..(11): 2'-deoxy
  misc_feature (12)..(13): 2'-deoxy-2'-fluoro
  misc_feature (14)..(14): 2'-deoxy
  misc_feature (15)..(15): 2'-deoxy-2'-fluoro
  misc_feature (16)..(16): 2'-deoxy
  misc_feature (17)..(19): 2'-deoxy-2'-fluoro
  misc_feature (20)..(20): Phosphorothioate 3'-Internucleotide Linkage
  misc_feature (21)..(21): n stands for thymidine
acaggcuaugguuguguucnn

SEQ ID NO: 1737 - RNA, 21 nt, Artificial Sequence
  Description of Artificial Sequence:  Target Sequence
  misc_feature (1)..(3): 2'-deoxy-2'-fluoro
  misc_feature (4)..(4): 2'-deoxy
  misc_feature (5)..(10): 2'-deoxy-2'-fluoro
  misc_feature (11)..(13): 2'-deoxy
  misc_feature (14)..(16): 2'-deoxy-2'-fluoro
  misc_feature (17)..(18): 2'-deoxy
  misc_feature (19)..(19): 2'-deoxy-2'-fluoro
  misc_feature (20)..(20): Phosphorothioate 3'-Internucleotide Linkage
  misc_feature (21)..(21): n stands for thymidine
cucgucccucaaaucuggunn

SEQ ID NO: 1738 - RNA, 21 nt, Artificial Sequence
  Description of Artificial Sequence:  Target Sequence
  misc_feature (1)..(4): 2'-deoxy-2'-fluoro
  misc_feature (5)..(5): 2'-deoxy
  misc_feature (6)..(7): 2'-deoxy-2'-fluoro
  misc_feature (8)..(8): 2'-deoxy
  misc_feature (9)..(12): 2'-deoxy-2'-fluoro
  misc_feature (13)..(15): 2'-deoxy
  misc_feature (16)..(16): 2'-deoxy-2'-fluoro
  misc_feature (17)..(17): 2'-deoxy
  misc_feature (18)..(18): 2'-deoxy-2'-fluoro
  misc_feature (19)..(19): 2'-deoxy
  misc_feature (20)..(20): Phosphorothioate 3'-Internucleotide Linkage
  misc_feature (21)..(21): n stands for thymidine
uucuaccgcuuugggcauann

SEQ ID NO: 1739 - RNA, 21 nt, Artificial Sequence
  Description of Artificial Sequence:  Target Sequence
  misc_feature (1)..(1): 5'-3 attached terminal deoxyabasic moeity
  misc_feature (1)..(2): 2'-O-methyl
  misc_feature (3)..(3): 2'-deoxy-2'-fluoro
  misc_feature (4)..(6): 2'-O-methyl
  misc_feature (7)..(7): 2'-deoxy-2'-fluoro
  misc_feature (8)..(9): 2'-O-methyl
  misc_feature (10)..(13): 2'-deoxy-2'-fluoro
  misc_feature (14)..(17): 2'-O-methyl
  misc_feature (18)..(18): 2'-deoxy-2'-fluoro
  misc_feature (19)..(19): 2'-O-methyl
  misc_feature (20)..(20): n stands for thymidine
  misc_feature (21)..(21): 3'-3 attached terminal deoxyabasic moeity
aauggacgaccccaggguann

SEQ ID NO: 1740 - RNA, 21 nt, Artificial Sequence
  Description of Artificial Sequence:  Target Sequence
  misc_feature (1)..(1): 5'-3 attached terminal deoxyabasic moeity
  misc_feature (1)..(1): 2'-O-methyl
  misc_feature (2)..(3): 2'-deoxy-2'-fluoro
  misc_feature (4)..(4): 2'-O-methyl
  misc_feature (5)..(5): 2'-deoxy-2'-fluoro
  misc_feature (6)..(6): 2'-O-methyl
  misc_feature (7)..(11): 2'-deoxy-2'-fluoro
  misc_feature (12)..(13): 2'-O-methyl
  misc_feature (14)..(16): 2'-deoxy-2'-fluoro
  misc_feature (17)..(19): 2'-O-methyl
  misc_feature (20)..(20): n stands for thymidine
  misc_feature (21)..(21): 3'-3 attached terminal deoxyabasic moeity
guugcacuccugaucuggann

SEQ ID NO: 1741 - RNA, 21 nt, Artificial Sequence
  Description of Artificial Sequence:  Target Sequence
  misc_feature (1)..(1): 5'-3 attached terminal deoxyabasic moeity
  misc_feature (1)..(3): 2'-O-methyl
  misc_feature (4)..(4): 2'-deoxy-2'-fluoro
  misc_feature (5)..(5): 2'-O-methyl
  misc_feature (6)..(6): 2'-deoxy-2'-fluoro
  misc_feature (7)..(16): 2'-O-methyl
  misc_feature (17)..(18): 2'-deoxy-2'-fluoro
  misc_feature (19)..(19): 2'-O-methyl
  misc_feature (20)..(20): n stands for thymidine
  misc_feature (21)..(21): 3'-3 attached terminal deoxyabasic moeity
aagcacagaaagggagucann

SEQ ID NO: 1742 - RNA, 21 nt, Artificial Sequence
  Description of Artificial Sequence:  Target Sequence
  misc_feature (1)..(1): 5'-3 attached terminal deoxyabasic moeity
  misc_feature (1)..(4): 2'-O-methyl
  misc_feature (5)..(6): 2'-deoxy-2'-fluoro
  misc_feature (7)..(7): 2'-O-methyl
  misc_feature (8)..(8): 2'-deoxy-2'-fluoro
  misc_feature (9)..(12): 2'-O-methyl
  misc_feature (13)..(13): 2'-deoxy-2'-fluoro
  misc_feature (14)..(14): 2'-O-methyl
  misc_feature (15)..(16): 2'-deoxy-2'-fluoro
  misc_feature (17)..(17): 2'-O-methyl
  misc_feature (18)..(19): 2'-deoxy-2'-fluoro
  misc_feature (20)..(20): n stands for thymidine
  misc_feature (21)..(21): 3'-3 attached terminal deoxyabasic moeity
ggagucacaagacacuguunn

SEQ ID NO: 1743 - RNA, 21 nt, Artificial Sequence
  Description of Artificial Sequence:  Target Sequence
  misc_feature (1)..(1): 5'-3 attached terminal deoxyabasic moeity
  misc_feature (1)..(2): 2'-deoxy-2'-fluoro
  misc_feature (3)..(6): 2'-O-methyl
  misc_feature (7)..(7): 2'-deoxy-2'-fluoro
  misc_feature (8)..(8): 2'-O-methyl
  misc_feature (9)..(9): 2'-deoxy-2'-fluoro
  misc_feature (10)..(11): 2'-O-methyl
  misc_feature (12)..(13): 2'-deoxy-2'-fluoro
  misc_feature (14)..(14): 2'-O-methyl
  misc_feature (15)..(15): 2'-deoxy-2'-fluoro
  misc_feature (16)..(17): 2'-O-methyl
  misc_feature (18)..(19): 2'-deoxy-2'-fluoro
  misc_feature (20)..(20): n stands for thymidine
  misc_feature (21)..(21): 3'-3 attached terminal deoxyabasic moeity
cuggaacacaaccauagccnn

SEQ ID NO: 1744 - RNA, 21 nt, Artificial Sequence
  Description of Artificial Sequence:  Target Sequence
  misc_feature (1)..(1): 5'-3 attached terminal deoxyabasic moeity
  misc_feature (1)..(3): 2'-O-methyl
  misc_feature (4)..(4): 2'-deoxy-2'-fluoro
  misc_feature (5)..(5): 2'-O-methyl
  misc_feature (6)..(6): 2'-deoxy-2'-fluoro
  misc_feature (7)..(8): 2'-O-methyl
  misc_feature (9)..(10): 2'-deoxy-2'-fluoro
  misc_feature (11)..(11): 2'-O-methyl
  misc_feature (12)..(12): 2'-deoxy-2'-fluoro
  misc_feature (13)..(14): 2'-O-methyl
  misc_feature (15)..(17): 2'-deoxy-2'-fluoro
  misc_feature (18)..(18): 2'-O-methyl
  misc_feature (19)..(19): 2'-deoxy-2'-fluoro
  misc_feature (20)..(20): n stands for thymidine
  misc_feature (21)..(21): 3'-3 attached terminal deoxyabasic moeity
gaacacaaccauagccugunn

SEQ ID NO: 1745 - RNA, 21 nt, Artificial Sequence
  Description of Artificial Sequence:  Target Sequence
  misc_feature (1)..(1): 5'-3 attached terminal deoxyabasic moeity
  misc_feature (1)..(1): 2'-O-methyl
  misc_feature (2)..(3): 2'-deoxy-2'-fluoro
  misc_feature (4)..(6): 2'-O-methyl
  misc_feature (7)..(9): 2'-deoxy-2'-fluoro
  misc_feature (10)..(15): 2'-O-methyl
  misc_feature (16)..(16): 2'-deoxy-2'-fluoro
  misc_feature (17)..(19): 2'-O-methyl
  misc_feature (20)..(20): n stands for thymidine
  misc_feature (21)..(21): 3'-3 attached terminal deoxyabasic moeity
accagauuugagggacgagnn

SEQ ID NO: 1746 - RNA, 21 nt, Artificial Sequence
  Description of Artificial Sequence:  Target Sequence
  misc_feature (1)..(1): 5'-3 attached terminal deoxyabasic moeity
  misc_feature (1)..(1): 2'-deoxy-2'-fluoro
  misc_feature (2)..(2): 2'-O-methyl
  misc_feature (3)..(3): 2'-deoxy-2'-fluoro
  misc_feature (4)..(4): 2'-O-methyl
  misc_feature (5)..(7): 2'-deoxy-2'-fluoro
  misc_feature (8)..(11): 2'-O-methyl
  misc_feature (12)..(12): 2'-deoxy-2'-fluoro
  misc_feature (13)..(14): 2'-O-methyl
  misc_feature (15)..(15): 2'-deoxy-2'-fluoro
  misc_feature (16)..(19): 2'-O-methyl
  misc_feature (20)..(20): n stands for thymidine
  misc_feature (21)..(21): 3'-3 attached terminal deoxyabasic moeity
uaugcccaaagcgguagaann

SEQ ID NO: 1747 - RNA, 21 nt, Artificial Sequence
  Description of Artificial Sequence:  Target Sequence
  misc_feature (1)..(1): 2'-deoxy-2'-fluoro
  misc_feature (2)..(2): 2'-O-methyl
  misc_feature (3)..(6): 2'-deoxy-2'-fluoro
  misc_feature (7)..(10): 2'-O-methyl
  misc_feature (11)..(12): 2'-deoxy-2'-fluoro
  misc_feature (13)..(13): 2'-O-methyl
  misc_feature (14)..(16): 2'-deoxy-2'-fluoro
  misc_feature (17)..(17): 2'-O-methyl
  misc_feature (18)..(19): 2'-deoxy-2'-fluoro
  misc_feature (20)..(20): Phosphorothioate 3'-Internucleotide Linkage
  misc_feature (21)..(21): n stands for thymidine
uacccuggggucguccauunn

SEQ ID NO: 1748 - RNA, 21 nt, Artificial Sequence
  Description of Artificial Sequence:  Target Sequence
  misc_feature (1)..(3): 2'-deoxy-2'-fluoro
  misc_feature (4)..(6): 2'-O-methyl
  misc_feature (7)..(8): 2'-deoxy-2'-fluoro
  misc_feature (9)..(13): 2'-O-methyl
  misc_feature (14)..(14): 2'-deoxy-2'-fluoro
  misc_feature (15)..(15): 2'-O-methyl
  misc_feature (16)..(16): 2'-deoxy-2'-fluoro
  misc_feature (17)..(18): 2'-O-methyl
  misc_feature (19)..(19): 2'-deoxy-2'-fluoro
  misc_feature (20)..(20): Phosphorothioate 3'-Internucleotide Linkage
  misc_feature (21)..(21): n stands for thymidine
uccagaucaggagugcaacnn

SEQ ID NO: 1749 - RNA, 21 nt, Artificial Sequence
  Description of Artificial Sequence:  Target Sequence
  misc_feature (1)..(1): 2'-deoxy-2'-fluoro
  misc_feature (2)..(3): 2'-O-methyl
  misc_feature (4)..(13): 2'-deoxy-2'-fluoro
  misc_feature (14)..(14): 2'-O-methyl
  misc_feature (15)..(15): 2'-deoxy-2'-fluoro
  misc_feature (16)..(16): 2'-O-methyl
  misc_feature (17)..(19): 2'-deoxy-2'-fluoro
  misc_feature (20)..(20): Phosphorothioate 3'-Internucleotide Linkage
  misc_feature (21)..(21): n stands for thymidine
ugacucccuuucugugcuunn

SEQ ID NO: 1750 - RNA, 21 nt, Artificial Sequence
  Description of Artificial Sequence:  Target Sequence
  misc_feature (1)..(2): 2'-O-methyl
  misc_feature (3)..(3): 2'-deoxy-2'-fluoro
  misc_feature (4)..(5): 2'-O-methyl
  misc_feature (6)..(6): 2'-deoxy-2'-fluoro
  misc_feature (7)..(7): 2'-O-methyl
  misc_feature (8)..(11): 2'-deoxy-2'-fluoro
  misc_feature (12)..(12): 2'-O-methyl
  misc_feature (13)..(13): 2'-deoxy-2'-fluoro
  misc_feature (14)..(15): 2'-O-methyl
  misc_feature (16)..(19): 2'-deoxy-2'-fluoro
  misc_feature (20)..(20): Phosphorothioate 3'-Internucleotide Linkage
  misc_feature (21)..(21): n stands for thymidine
aacagugucuugugacuccnn

SEQ ID NO: 1751 - RNA, 21 nt, Artificial Sequence
  Description of Artificial Sequence:  Target Sequence
  misc_feature (1)..(2): 2'-O-methyl
  misc_feature (3)..(4): 2'-deoxy-2'-fluoro
  misc_feature (5)..(5): 2'-O-methyl
  misc_feature (6)..(6): 2'-deoxy-2'-fluoro
  misc_feature (7)..(8): 2'-O-methyl
  misc_feature (9)..(10): 2'-deoxy-2'-fluoro
  misc_feature (11)..(11): 2'-O-methyl
  misc_feature (12)..(12): 2'-deoxy-2'-fluoro
  misc_feature (13)..(13): 2'-O-methyl
  misc_feature (14)..(17): 2'-deoxy-2'-fluoro
  misc_feature (18)..(19): 2'-O-methyl
  misc_feature (20)..(20): Phosphorothioate 3'-Internucleotide Linkage
  misc_feature (21)..(21): n stands for thymidine
ggcuaugguuguguuccagnn

SEQ ID NO: 1752 - RNA, 21 nt, Artificial Sequence
  Description of Artificial Sequence:  Target Sequence
  misc_feature (1)..(1): 2'-O-methyl
  misc_feature (2)..(2): 2'-deoxy-2'-fluoro
  misc_feature (3)..(5): 2'-O-methyl
  misc_feature (6)..(7): 2'-deoxy-2'-fluoro
  misc_feature (8)..(8): 2'-O-methyl
  misc_feature (9)..(9): 2'-deoxy-2'-fluoro
  misc_feature (10)..(11): 2'-O-methyl
  misc_feature (12)..(13): 2'-deoxy-2'-fluoro
  misc_feature (14)..(14): 2'-O-methyl
  misc_feature (15)..(15): 2'-deoxy-2'-fluoro
  misc_feature (16)..(16): 2'-O-methyl
  misc_feature (17)..(19): 2'-deoxy-2'-fluoro
  misc_feature (20)..(20): Phosphorothioate 3'-Internucleotide Linkage
  misc_feature (21)..(21): n stands for thymidine
acaggcuaugguuguguucnn

SEQ ID NO: 1753 - RNA, 21 nt, Artificial Sequence
  Description of Artificial Sequence:  Target Sequence
  misc_feature (1)..(3): 2'-deoxy-2'-fluoro
  misc_feature (4)..(4): 2'-O-methyl
  misc_feature (5)..(10): 2'-deoxy-2'-fluoro
  misc_feature (11)..(13): 2'-O-methyl
  misc_feature (14)..(16): 2'-deoxy-2'-fluoro
  misc_feature (17)..(18): 2'-O-methyl
  misc_feature (19)..(19): 2'-deoxy-2'-fluoro
  misc_feature (20)..(20): Phosphorothioate 3'-Internucleotide Linkage
  misc_feature (21)..(21): n stands for thymidine
cucgucccucaaaucuggunn

SEQ ID NO: 1754 - RNA, 21 nt, Artificial Sequence
  Description of Artificial Sequence:  Target Sequence
  misc_feature (1)..(4): 2'-deoxy-2'-fluoro
  misc_feature (5)..(5): 2'-O-methyl
  misc_feature (6)..(7): 2'-deoxy-2'-fluoro
  misc_feature (8)..(8): 2'-O-methyl
  misc_feature (9)..(12): 2'-deoxy-2'-fluoro
  misc_feature (13)..(15): 2'-O-methyl
  misc_feature (16)..(16): 2'-deoxy-2'-fluoro
  misc_feature (17)..(17): 2'-O-methyl
  misc_feature (18)..(18): 2'-deoxy-2'-fluoro
  misc_feature (19)..(19): 2'-O-methyl
  misc_feature (20)..(20): Phosphorothioate 3'-Internucleotide Linkage
  misc_feature (21)..(21): n stands for thymidine
uucuaccgcuuugggcauann

SEQ ID NO: 1755 - RNA, 21 nt, Artificial Sequence
  Description of Artificial Sequence:  Target Sequence
  misc_feature (1)..(1): 5'-3 attached terminal deoxyabasic moeity
  misc_feature (20)..(20): n stands for thymidine
  misc_feature (21)..(21): 3'-3 attached terminal deoxyabasic moeity
aauggacgaccccaggguann

SEQ ID NO: 1756 - RNA, 21 nt, Artificial Sequence
  Description of Artificial Sequence:  Target Sequence
  misc_feature (1)..(1): 5'-3 attached terminal deoxyabasic moeity
  misc_feature (20)..(20): n stands for thymidine
  misc_feature (21)..(21): 3'-3 attached terminal deoxyabasic moeity
guugcacuccugaucuggann

SEQ ID NO: 1757 - RNA, 21 nt, Artificial Sequence
  Description of Artificial Sequence:  Target Sequence
  misc_feature (1)..(1): 5'-3 attached terminal deoxyabasic moeity
  misc_feature (20)..(20): n stands for thymidine
  misc_feature (21)..(21): 3'-3 attached terminal deoxyabasic moeity
aagcacagaaagggagucann

SEQ ID NO: 1758 - RNA, 21 nt, Artificial Sequence
  Description of Artificial Sequence:  Target Sequence
  misc_feature (1)..(1): 5'-3 attached terminal deoxyabasic moeity
  misc_feature (20)..(20): n stands for thymidine
  misc_feature (21)..(21): 3'-3 attached terminal deoxyabasic moeity
ggagucacaagacacuguunn

SEQ ID NO: 1759 - RNA, 21 nt, Artificial Sequence
  Description of Artificial Sequence:  Target Sequence
  misc_feature (1)..(1): 5'-3 attached terminal deoxyabasic moeity
  misc_feature (20)..(20): n stands for thymidine
  misc_feature (21)..(21): 3'-3 attached terminal deoxyabasic moeity
cuggaacacaaccauagccnn

SEQ ID NO: 1760 - RNA, 21 nt, Artificial Sequence
  Description of Artificial Sequence:  Target Sequence
  misc_feature (1)..(1): 5'-3 attached terminal deoxyabasic moeity
  misc_feature (20)..(20): n stands for thymidine
  misc_feature (21)..(21): 3'-3 attached terminal deoxyabasic moeity
gaacacaaccauagccugunn

SEQ ID NO: 1761 - RNA, 21 nt, Artificial Sequence
  Description of Artificial Sequence:  Target Sequence
  misc_feature (1)..(1): 5'-3 attached terminal deoxyabasic moeity
  misc_feature (20)..(20): n stands for thymidine
  misc_feature (21)..(21): 3'-3 attached terminal deoxyabasic moeity
accagauuugagggacgagnn

SEQ ID NO: 1762 - RNA, 21 nt, Artificial Sequence
  Description of Artificial Sequence:  Target Sequence
  misc_feature (1)..(1): 5'-3 attached terminal deoxyabasic moeity
  misc_feature (20)..(20): n stands for thymidine
  misc_feature (21)..(21): 3'-3 attached terminal deoxyabasic moeity
uaugcccaaagcgguagaann

SEQ ID NO: 1763 - RNA, 21 nt, Artificial Sequence
  Description of Artificial Sequence:  Target Sequence
  misc_feature (20)..(20): Phosphorothioate 3'-Internucleotide Linkage
  misc_feature (21)..(21): n stands for thymidine
uacccuggggucguccauunn

SEQ ID NO: 1764 - RNA, 21 nt, Artificial Sequence
  Description of Artificial Sequence:  Target Sequence
  misc_feature (20)..(20): Phosphorothioate 3'-Internucleotide Linkage
  misc_feature (21)..(21): n stands for thymidine
uccagaucaggagugcaacnn

SEQ ID NO: 1765 - RNA, 21 nt, Artificial Sequence
  Description of Artificial Sequence:  Target Sequence
  misc_feature (20)..(20): Phosphorothioate 3'-Internucleotide Linkage
  misc_feature (21)..(21): n stands for thymidine
ugacucccuuucugugcuunn

SEQ ID NO: 1766 - RNA, 21 nt, Artificial Sequence
  Description of Artificial Sequence:  Target Sequence
  misc_feature (20)..(20): Phosphorothioate 3'-Internucleotide Linkage
  misc_feature (21)..(21): n stands for thymidine
aacagugucuugugacuccnn

SEQ ID NO: 1767 - RNA, 21 nt, Artificial Sequence
  Description of Artificial Sequence:  Target Sequence
  misc_feature (20)..(20): Phosphorothioate 3'-Internucleotide Linkage
  misc_feature (21)..(21): n stands for thymidine
ggcuaugguuguguuccagnn

SEQ ID NO: 1768 - RNA, 21 nt, Artificial Sequence
  Description of Artificial Sequence:  Target Sequence
  misc_feature (20)..(20): Phosphorothioate 3'-Internucleotide Linkage
  misc_feature (21)..(21): n stands for thymidine
acaggcuaugguuguguucnn

SEQ ID NO: 1769 - RNA, 21 nt, Artificial Sequence
  Description of Artificial Sequence:  Target Sequence
  misc_feature (20)..(20): Phosphorothioate 3'-Internucleotide Linkage
  misc_feature (21)..(21): n stands for thymidine
cucgucccucaaaucuggunn

SEQ ID NO: 1770 - RNA, 21 nt, Artificial Sequence
  Description of Artificial Sequence:  Target Sequence
  misc_feature (20)..(20): Phosphorothioate 3'-Internucleotide Linkage
  misc_feature (21)..(21): n stands for thymidine
uucuaccgcuuugggcauann

SEQ ID NO: 1771 - RNA, 21 nt, Artificial Sequence
  Description of Artificial Sequence:  Target Sequence
  misc_feature (1)..(1): 2'-deoxy-2'-fluoro
  misc_feature (2)..(2): 2'-O-methyl
  misc_feature (3)..(6): 2'-deoxy-2'-fluoro
  misc_feature (7)..(10): 2'-O-methyl
  misc_feature (11)..(12): 2'-deoxy-2'-fluoro
  misc_feature (13)..(13): 2'-O-methyl
  misc_feature (14)..(16): 2'-deoxy-2'-fluoro
  misc_feature (17)..(17): 2'-O-methyl
  misc_feature (18)..(19): 2'-deoxy-2'-fluoro
  misc_feature (20)..(20): n stands for thymidine
  misc_feature (21)..(21): 3'-3 attached terminal deoxyabasic moeity
uacccuggggucguccauunn

SEQ ID NO: 1772 - RNA, 21 nt, Artificial Sequence
  Description of Artificial Sequence:  Target Sequence
  misc_feature (1)..(3): 2'-deoxy-2'-fluoro
  misc_feature (4)..(6): 2'-O-methyl
  misc_feature (7)..(8): 2'-deoxy-2'-fluoro
  misc_feature (9)..(13): 2'-O-methyl
  misc_feature (14)..(14): 2'-deoxy-2'-fluoro
  misc_feature (15)..(15): 2'-O-methyl
  misc_feature (16)..(16): 2'-deoxy-2'-fluoro
  misc_feature (17)..(18): 2'-O-methyl
  misc_feature (19)..(19): 2'-deoxy-2'-fluoro
  misc_feature (20)..(20): n stands for thymidine
  misc_feature (21)..(21): 3'-3 attached terminal deoxyabasic moeity
uccagaucaggagugcaacnn

SEQ ID NO: 1773 - RNA, 21 nt, Artificial Sequence
  Description of Artificial Sequence:  Target Sequence
  misc_feature (1)..(1): 2'-deoxy-2'-fluoro
  misc_feature (2)..(3): 2'-O-methyl
  misc_feature (4)..(13): 2'-deoxy-2'-fluoro
  misc_feature (14)..(14): 2'-O-methyl
  misc_feature (15)..(15): 2'-deoxy-2'-fluoro
  misc_feature (16)..(16): 2'-O-methyl
  misc_feature (17)..(19): 2'-deoxy-2'-fluoro
  misc_feature (20)..(20): n stands for thymidine
  misc_feature (21)..(21): 3'-3 attached terminal deoxyabasic moeity
ugacucccuuucugugcuunn

SEQ ID NO: 1774 - RNA, 21 nt, Artificial Sequence
  Description of Artificial Sequence:  Target Sequence
  misc_feature (1)..(2): 2'-O-methyl
  misc_feature (3)..(3): 2'-deoxy-2'-fluoro
  misc_feature (4)..(5): 2'-O-methyl
  misc_feature (6)..(6): 2'-deoxy-2'-fluoro
  misc_feature (7)..(7): 2'-O-methyl
  misc_feature (8)..(11): 2'-deoxy-2'-fluoro
  misc_feature (12)..(12): 2'-O-methyl
  misc_feature (13)..(13): 2'-deoxy-2'-fluoro
  misc_feature (14)..(15): 2'-O-methyl
  misc_feature (16)..(19): 2'-deoxy-2'-fluoro
  misc_feature (20)..(20): n stands for thymidine
  misc_feature (21)..(21): 3'-3 attached terminal deoxyabasic moeity
aacagugucuugugacuccnn

SEQ ID NO: 1775 - RNA, 21 nt, Artificial Sequence
  Description of Artificial Sequence:  Target Sequence
  misc_feature (1)..(2): 2'-O-methyl
  misc_feature (3)..(4): 2'-deoxy-2'-fluoro
  misc_feature (5)..(5): 2'-O-methyl
  misc_feature (6)..(6): 2'-deoxy-2'-fluoro
  misc_feature (7)..(8): 2'-O-methyl
  misc_feature (9)..(10): 2'-deoxy-2'-fluoro
  misc_feature (11)..(11): 2'-O-methyl
  misc_feature (12)..(12): 2'-deoxy-2'-fluoro
  misc_feature (13)..(13): 2'-O-methyl
  misc_feature (14)..(17): 2'-deoxy-2'-fluoro
  misc_feature (18)..(19): 2'-O-methyl
  misc_feature (20)..(20): n stands for thymidine
  misc_feature (21)..(21): 3'-3 attached terminal deoxyabasic moeity
ggcuaugguuguguuccagnn

SEQ ID NO: 1776 - RNA, 21 nt, Artificial Sequence
  Description of Artificial Sequence:  Target Sequence
  misc_feature (1)..(1): 2'-O-methyl
  misc_feature (2)..(2): 2'-deoxy-2'-fluoro
  misc_feature (3)..(5): 2'-O-methyl
  misc_feature (6)..(7): 2'-deoxy-2'-fluoro
  misc_feature (8)..(8): 2'-O-methyl
  misc_feature (9)..(9): 2'-deoxy-2'-fluoro
  misc_feature (10)..(11): 2'-O-methyl
  misc_feature (12)..(13): 2'-deoxy-2'-fluoro
  misc_feature (14)..(14): 2'-O-methyl
  misc_feature (15)..(15): 2'-deoxy-2'-fluoro
  misc_feature (16)..(16): 2'-O-methyl
  misc_feature (17)..(19): 2'-deoxy-2'-fluoro
  misc_feature (20)..(20): n stands for thymidine
  misc_feature (21)..(21): 3'-3 attached terminal deoxyabasic moeity
acaggcuaugguuguguucnn

SEQ ID NO: 1777 - RNA, 21 nt, Artificial Sequence
  Description of Artificial Sequence:  Target Sequence
  misc_feature (1)..(3): 2'-deoxy-2'-fluoro
  misc_feature (4)..(4): 2'-O-methyl
  misc_feature (5)..(10): 2'-deoxy-2'-fluoro
  misc_feature (11)..(13): 2'-O-methyl
  misc_feature (14)..(16): 2'-deoxy-2'-fluoro
  misc_feature (17)..(18): 2'-O-methyl
  misc_feature (19)..(19): 2'-deoxy-2'-fluoro
  misc_feature (20)..(20): n stands for thymidine
  misc_feature (21)..(21): 3'-3 attached terminal deoxyabasic moeity
cucgucccucaaaucuggunn

SEQ ID NO: 1778 - RNA, 21 nt, Artificial Sequence
  Description of Artificial Sequence:  Target Sequence
  misc_feature (1)..(4): 2'-deoxy-2'-fluoro
  misc_feature (5)..(5): 2'-O-methyl
  misc_feature (6)..(7): 2'-deoxy-2'-fluoro
  misc_feature (8)..(8): 2'-O-methyl
  misc_feature (9)..(12): 2'-deoxy-2'-fluoro
  misc_feature (13)..(15): 2'-O-methyl
  misc_feature (16)..(16): 2'-deoxy-2'-fluoro
  misc_feature (17)..(17): 2'-O-methyl
  misc_feature (18)..(18): 2'-deoxy-2'-fluoro
  misc_feature (19)..(19): 2'-O-methyl
  misc_feature (20)..(20): n stands for thymidine
  misc_feature (21)..(21): 3'-3 attached terminal deoxyabasic moeity
uucuaccgcuuugggcauann

SEQ ID NO: 1779 - RNA, 21 nt, Artificial Sequence
  Description of Artificial Sequence:  Target Sequence
  misc_feature (20)..(20): n stands for thymidine
  misc_feature (21)..(21): 3'-3 attached terminal deoxyabasic moeity
uacccuggggucguccauunn

SEQ ID NO: 1780 - RNA, 21 nt, Artificial Sequence
  Description of Artificial Sequence:  Target Sequence
  misc_feature (20)..(20): n stands for thymidine
  misc_feature (21)..(21): 3'-3 attached terminal deoxyabasic moeity
uccagaucaggagugcaacnn

SEQ ID NO: 1781 - RNA, 21 nt, Artificial Sequence
  Description of Artificial Sequence:  Target Sequence
  misc_feature (20)..(20): n stands for thymidine
  misc_feature (21)..(21): 3'-3 attached terminal deoxyabasic moeity
ugacucccuuucugugcuunn

SEQ ID NO: 1782 - RNA, 21 nt, Artificial Sequence
  Description of Artificial Sequence:  Target Sequence
  misc_feature (20)..(20): n stands for thymidine
  misc_feature (21)..(21): 3'-3 attached terminal deoxyabasic moeity
aacagugucuugugacuccnn

SEQ ID NO: 1783 - RNA, 21 nt, Artificial Sequence
  Description of Artificial Sequence:  Target Sequence
  misc_feature (20)..(20): n stands for thymidine
  misc_feature (21)..(21): 3'-3 attached terminal deoxyabasic moeity
ggcuaugguuguguuccagnn

SEQ ID NO: 1784 - RNA, 21 nt, Artificial Sequence
  Description of Artificial Sequence:  Target Sequence
  misc_feature (20)..(20): n stands for thymidine
  misc_feature (21)..(21): 3'-3 attached terminal deoxyabasic moeity
acaggcuaugguuguguucnn

SEQ ID NO: 1785 - RNA, 21 nt, Artificial Sequence
  Description of Artificial Sequence:  Target Sequence
  misc_feature (20)..(20): n stands for thymidine
  misc_feature (21)..(21): 3'-3 attached terminal deoxyabasic moeity
cucgucccucaaaucuggunn

SEQ ID NO: 1786 - RNA, 21 nt, Artificial Sequence
  Description of Artificial Sequence:  Target Sequence
  misc_feature (20)..(20): n stands for thymidine
  misc_feature (21)..(21): 3'-3 attached terminal deoxyabasic moeity
uucuaccgcuuugggcauann

SEQ ID NO: 1787 - RNA, 21 nt, Artificial Sequence
  Description of Artificial Sequence:  Target Sequence
  misc_feature (20)..(21): n stands for thymidine
acugaugaagaaacugaggnn

SEQ ID NO: 1788 - RNA, 21 nt, Artificial Sequence
  Description of Artificial Sequence:  Target Sequence
  misc_feature (20)..(21): n stands for thymidine
ccagggagcaucauucauunn

SEQ ID NO: 1789 - RNA, 21 nt, Artificial Sequence
  Description of Artificial Sequence:  Target Sequence
  misc_feature (20)..(21): n stands for thymidine
cgcuaugucuguaguggggnn

SEQ ID NO: 1790 - RNA, 21 nt, Artificial Sequence
  Description of Artificial Sequence:  Target Sequence
  misc_feature (20)..(21): n stands for thymidine
gagcugacccucaaauacgnn

SEQ ID NO: 1791 - RNA, 21 nt, Artificial Sequence
  Description of Artificial Sequence:  Target Sequence
  misc_feature (20)..(21): n stands for thymidine
cgacauucacugaggacacnn

SEQ ID NO: 1792 - RNA, 21 nt, Artificial Sequence
  Description of Artificial Sequence:  Target Sequence
  misc_feature (20)..(21): n stands for thymidine
gcucaagaccuacaaugugnn

SEQ ID NO: 1793 - RNA, 21 nt, Artificial Sequence
  Description of Artificial Sequence:  Target Sequence
  misc_feature (20)..(21): n stands for thymidine
cuacaauguggccauggacnn

SEQ ID NO: 1794 - RNA, 21 nt, Artificial Sequence
  Description of Artificial Sequence:  Target Sequence
  misc_feature (20)..(21): n stands for thymidine
guguucccaaugcuuugucnn

SEQ ID NO: 1795 - RNA, 21 nt, Artificial Sequence
  Description of Artificial Sequence:  Target Sequence
  misc_feature (20)..(21): n stands for thymidine
ccucaguuucuucaucagunn

SEQ ID NO: 1796 - RNA, 21 nt, Artificial Sequence
  Description of Artificial Sequence:  Target Sequence
  misc_feature (20)..(21): n stands for thymidine
aaugaaugaugcucccuggnn

SEQ ID NO: 1797 - RNA, 21 nt, Artificial Sequence
  Description of Artificial Sequence:  Target Sequence
  misc_feature (20)..(21): n stands for thymidine
ccccacuacagacauagcgnn

SEQ ID NO: 1798 - RNA, 21 nt, Artificial Sequence
  Description of Artificial Sequence:  Target Sequence
  misc_feature (20)..(21): n stands for thymidine
cguauuugagggucagcucnn

SEQ ID NO: 1799 - RNA, 21 nt, Artificial Sequence
  Description of Artificial Sequence:  Target Sequence
  misc_feature (20)..(21): n stands for thymidine
guguccucagugaaugucgnn

SEQ ID NO: 1800 - RNA, 21 nt, Artificial Sequence
  Description of Artificial Sequence:  Target Sequence
  misc_feature (20)..(21): n stands for thymidine
cacauuguaggucuugagcnn

SEQ ID NO: 1801 - RNA, 21 nt, Artificial Sequence
  Description of Artificial Sequence:  Target Sequence
  misc_feature (20)..(21): n stands for thymidine
guccauggccacauuguagnn

SEQ ID NO: 1802 - RNA, 21 nt, Artificial Sequence
  Description of Artificial Sequence:  Target Sequence
  misc_feature (20)..(21): n stands for thymidine
gacaaagcauugggaacacnn

SEQ ID NO: 1803 - RNA, 21 nt, Artificial Sequence
  Description of Artificial Sequence:  Target Sequence
  misc_feature: 2'-deoxy-2'-fluoro
  misc_feature (1)..(1): 5'-3 attached terminal deoxyabasic moeity
  misc_feature (2)..(3): 2'-deoxy-2'-fluoro
  misc_feature (6)..(6): 2'-deoxy-2'-fluoro
  misc_feature (14)..(15): 2'-deoxy-2'-fluoro
  misc_feature (20)..(20): n stands for thymidine
  misc_feature (21)..(21): 3'-3 attached terminal deoxyabasic moeity
acugaugaagaaacugaggnn

SEQ ID NO: 1804 - RNA, 21 nt, Artificial Sequence
  Description of Artificial Sequence:  Target Sequence
  misc_feature (1)..(1): 5'-3 attached terminal deoxyabasic moeity
  misc_feature (1)..(2): 2'-deoxy-2'-fluoro
  misc_feature (9)..(9): 2'-deoxy-2'-fluoro
  misc_feature (11)..(12): 2'-deoxy-2'-fluoro
  misc_feature (14)..(16): 2'-deoxy-2'-fluoro
  misc_feature (18)..(19): 2'-deoxy-2'-fluoro
  misc_feature (20)..(20): n stands for thymidine
  misc_feature (21)..(21): 3'-3 attached terminal deoxyabasic moeity
ccagggagcaucauucauunn

SEQ ID NO: 1805 - RNA, 21 nt, Artificial Sequence
  Description of Artificial Sequence:  Target Sequence
  misc_feature (1)..(1): 5'-3 attached terminal deoxyabasic moeity
  misc_feature (1)..(1): 2'-deoxy-2'-fluoro
  misc_feature (3)..(4): 2'-deoxy-2'-fluoro
  misc_feature (6)..(6): 2'-deoxy-2'-fluoro
  misc_feature (8)..(10): 2'-deoxy-2'-fluoro
  misc_feature (12)..(12): 2'-deoxy-2'-fluoro
  misc_feature (15)..(15): 2'-deoxy-2'-fluoro
  misc_feature (20)..(20): n stands for thymidine
  misc_feature (21)..(21): 3'-3 attached terminal deoxyabasic moeity
cgcuaugucuguaguggggnn

SEQ ID NO: 1806 - RNA, 21 nt, Artificial Sequence
  Description of Artificial Sequence:  Target Sequence
  misc_feature (1)..(1): 5'-3 attached terminal deoxyabasic moeity
  misc_feature (4)..(5): 2'-deoxy-2'-fluoro
  misc_feature (8)..(12): 2'-deoxy-2'-fluoro
  misc_feature (16)..(16): 2'-deoxy-2'-fluoro
  misc_feature (18)..(18): 2'-deoxy-2'-fluoro
  misc_feature (20)..(20): n stands for thymidine
  misc_feature (21)..(21): 3'-3 attached terminal deoxyabasic moeity
gagcugacccucaaauacgnn

SEQ ID NO: 1807 - RNA, 21 nt, Artificial Sequence
  Description of Artificial Sequence:  Target Sequence
  misc_feature (1)..(1): 5'-3 attached terminal deoxyabasic moeity
  misc_feature (1)..(1): 2'-deoxy-2'-fluoro
  misc_feature (4)..(4): 2'-deoxy-2'-fluoro
  misc_feature (6)..(8): 2'-deoxy-2'-fluoro
  misc_feature (10)..(11): 2'-deoxy-2'-fluoro
  misc_feature (17)..(17): 2'-deoxy-2'-fluoro
  misc_feature (19)..(19): 2'-deoxy-2'-fluoro
  misc_feature (20)..(20): n stands for thymidine
  misc_feature (21)..(21): 3'-3 attached terminal deoxyabasic moeity
cgacauucacugaggacacnn

SEQ ID NO: 1808 - RNA, 21 nt, Artificial Sequence
  Description of Artificial Sequence:  Target Sequence
  misc_feature (1)..(1): 5'-3 attached terminal deoxyabasic moeity
  misc_feature (2)..(4): 2'-deoxy-2'-fluoro
  misc_feature (9)..(11): 2'-deoxy-2'-fluoro
  misc_feature (13)..(13): 2'-deoxy-2'-fluoro
  misc_feature (16)..(16): 2'-deoxy-2'-fluoro
  misc_feature (18)..(18): 2'-deoxy-2'-fluoro
  misc_feature (20)..(20): n stands for thymidine
  misc_feature (21)..(21): 3'-3 attached terminal deoxyabasic moeity
gcucaagaccuacaaugugnn

SEQ ID NO: 1809 - RNA, 21 nt, Artificial Sequence
  Description of Artificial Sequence:  Target Sequence
  misc_feature (1)..(1): 5'-3 attached terminal deoxyabasic moeity
  misc_feature (1)..(2): 2'-deoxy-2'-fluoro
  misc_feature (4)..(4): 2'-deoxy-2'-fluoro
  misc_feature (7)..(7): 2'-deoxy-2'-fluoro
  misc_feature (9)..(9): 2'-deoxy-2'-fluoro
  misc_feature (12)..(13): 2'-deoxy-2'-fluoro
  misc_feature (15)..(15): 2'-deoxy-2'-fluoro
  misc_feature (19)..(19): 2'-deoxy-2'-fluoro
  misc_feature (20)..(20): n stands for thymidine
  misc_feature (21)..(21): 3'-3 attached terminal deoxyabasic moeity
cuacaauguggccauggacnn

SEQ ID NO: 1810 - RNA, 21 nt, Artificial Sequence
  Description of Artificial Sequence:  Target Sequence
  misc_feature (1)..(1): 5'-3 attached terminal deoxyabasic moeity
  misc_feature (2)..(2): 2'-deoxy-2'-fluoro
  misc_feature (4)..(8): 2'-deoxy-2'-fluoro
  misc_feature (11)..(11): 2'-deoxy-2'-fluoro
  misc_feature (13)..(16): 2'-deoxy-2'-fluoro
  misc_feature (18)..(19): 2'-deoxy-2'-fluoro
  misc_feature (20)..(20): n stands for thymidine
  misc_feature (21)..(21): 3'-3 attached terminal deoxyabasic moeity
guguucccaaugcuuugucnn

SEQ ID NO: 1811 - RNA, 21 nt, Artificial Sequence
  Description of Artificial Sequence:  Target Sequence
  misc_feature (1)..(4): 2'-deoxy-2'-fluoro
  misc_feature (7)..(13): 2'-deoxy-2'-fluoro
  misc_feature (15)..(16): 2'-deoxy-2'-fluoro
  misc_feature (19)..(19): 2'-deoxy-2'-fluoro
  misc_feature (20)..(20): Phosphorothioate 3'-Internucleotide Linkage
  misc_feature (21)..(21): n stands for thymidine
ccucaguuucuucaucagunn

SEQ ID NO: 1812 - RNA, 21 nt, Artificial Sequence
  Description of Artificial Sequence:  Target Sequence
  misc_feature (3)..(3): 2'-deoxy-2'-fluoro
  misc_feature (7)..(7): 2'-deoxy-2'-fluoro
  misc_feature (10)..(10): 2'-deoxy-2'-fluoro
  misc_feature (12)..(17): 2'-deoxy-2'-fluoro
  misc_feature (20)..(20): Phosphorothioate 3'-Internucleotide Linkage
  misc_feature (21)..(21): n stands for thymidine
aaugaaugaugcucccuggnn

SEQ ID NO: 1813 - RNA, 21 nt, Artificial Sequence
  Description of Artificial Sequence:  Target Sequence
  misc_feature (1)..(4): 2'-deoxy-2'-fluoro
  misc_feature (6)..(7): 2'-deoxy-2'-fluoro
  misc_feature (9)..(9): 2'-deoxy-2'-fluoro
  misc_feature (13)..(13): 2'-deoxy-2'-fluoro
  misc_feature (15)..(15): 2'-deoxy-2'-fluoro
  misc_feature (18)..(18): 2'-deoxy-2'-fluoro
  misc_feature (20)..(20): Phosphorothioate 3'-Internucleotide Linkage
  misc_feature (21)..(21): n stands for thymidine
ccccacuacagacauagcgnn

SEQ ID NO: 1814 - RNA, 21 nt, Artificial Sequence
  Description of Artificial Sequence:  Target Sequence
  misc_feature (1)..(1): 2'-deoxy-2'-fluoro
  misc_feature (3)..(3): 2'-deoxy-2'-fluoro
  misc_feature (5)..(7): 2'-deoxy-2'-fluoro
  misc_feature (13)..(14): 2'-deoxy-2'-fluoro
  misc_feature (17)..(19): 2'-deoxy-2'-fluoro
  misc_feature (20)..(20): Phosphorothioate 3'-Internucleotide Linkage
  misc_feature (21)..(21): n stands for thymidine
cguauuugagggucagcucnn

SEQ ID NO: 1815 - RNA, 21 nt, Artificial Sequence
  Description of Artificial Sequence:  Target Sequence
  misc_feature (2)..(2): 2'-deoxy-2'-fluoro
  misc_feature (4)..(8): 2'-deoxy-2'-fluoro
  misc_feature (11)..(11): 2'-deoxy-2'-fluoro
  misc_feature (15)..(15): 2'-deoxy-2'-fluoro
  misc_feature (17)..(18): 2'-deoxy-2'-fluoro
  misc_feature (20)..(20): Phosphorothioate 3'-Internucleotide Linkage
  misc_feature (21)..(21): n stands for thymidine
guguccucagugaaugucgnn

SEQ ID NO: 1816 - RNA, 21 nt, Artificial Sequence
  Description of Artificial Sequence:  Target Sequence
  misc_feature (1)..(1): 2'-deoxy-2'-fluoro
  misc_feature (3)..(3): 2'-deoxy-2'-fluoro
  misc_feature (5)..(6): 2'-deoxy-2'-fluoro
  misc_feature (8)..(8): 2'-deoxy-2'-fluoro
  misc_feature (12)..(15): 2'-deoxy-2'-fluoro
  misc_feature (19)..(19): 2'-deoxy-2'-fluoro
  misc_feature (20)..(20): Phosphorothioate 3'-Internucleotide Linkage
  misc_feature (21)..(21): n stands for thymidine
cacauuguaggucuugagcnn

SEQ ID NO: 1817 - RNA, 21 nt, Artificial Sequence
  Description of Artificial Sequence:  Target Sequence
  misc_feature (2)..(4): 2'-deoxy-2'-fluoro
  misc_feature (6)..(6): 2'-deoxy-2'-fluoro
  misc_feature (9)..(10): 2'-deoxy-2'-fluoro
  misc_feature (12)..(12): 2'-deoxy-2'-fluoro
  misc_feature (14)..(15): 2'-deoxy-2'-fluoro
  misc_feature (17)..(17): 2'-deoxy-2'-fluoro
  misc_feature (20)..(20): Phosphorothioate 3'-Internucleotide Linkage
  misc_feature (21)..(21): n stands for thymidine
guccauggccacauuguagnn

SEQ ID NO: 1818 - RNA, 21 nt, Artificial Sequence
  Description of Artificial Sequence:  Target Sequence
  misc_feature (3)..(3): 2'-deoxy-2'-fluoro
  misc_feature (8)..(8): 2'-deoxy-2'-fluoro
  misc_feature (10)..(11): 2'-deoxy-2'-fluoro
  misc_feature (17)..(17): 2'-deoxy-2'-fluoro
  misc_feature (19)..(19): 2'-deoxy-2'-fluoro
  misc_feature (20)..(20): Phosphorothioate 3'-Internucleotide Linkage
  misc_feature (21)..(21): n stands for thymidine
gacaaagcauugggaacacnn

SEQ ID NO: 1819 - RNA, 21 nt, Artificial Sequence
  Description of Artificial Sequence:  Target Sequence
  misc_feature (1)..(1): 5'-3 attached terminal deoxyabasic moeity
  misc_feature (1)..(1): 2'-deoxy
  misc_feature (2)..(3): 2'-deoxy-2'-fluoro
  misc_feature (4)..(5): 2'-deoxy
  misc_feature (6)..(6): 2'-deoxy-2'-fluoro
  misc_feature (7)..(13): 2'-deoxy
  misc_feature (14)..(15): 2'-deoxy-2'-fluoro
  misc_feature (16)..(19): 2'-deoxy
  misc_feature (20)..(20): n stands for thymidine
  misc_feature (21)..(21): 3'-3 attached terminal deoxyabasic moeity
acugaugaagaaacugaggnn

SEQ ID NO: 1820 - RNA, 21 nt, Artificial Sequence
  Description of Artificial Sequence:  Target Sequence
  misc_feature (1)..(1): 5'-3 attached terminal deoxyabasic moeity
  misc_feature (1)..(2): 2'-deoxy-2'-fluoro
  misc_feature (3)..(8): 2'-deoxy
  misc_feature (9)..(9): 2'-deoxy-2'-fluoro
  misc_feature (10)..(10): 2'-deoxy
  misc_feature (11)..(12): 2'-deoxy-2'-fluoro
  misc_feature (13)..(13): 2'-deoxy
  misc_feature (14)..(16): 2'-deoxy-2'-fluoro
  misc_feature (17)..(17): 2'-deoxy
  misc_feature (18)..(19): 2'-deoxy-2'-fluoro
  misc_feature (20)..(20): n stands for thymidine
  misc_feature (21)..(21): 3'-3 attached terminal deoxyabasic moeity
ccagggagcaucauucauunn

SEQ ID NO: 1821 - RNA, 21 nt, Artificial Sequence
  Description of Artificial Sequence:  Target Sequence
  misc_feature (1)..(1): 5'-3 attached terminal deoxyabasic moeity
  misc_feature (1)..(1): 2'-deoxy-2'-fluoro
  misc_feature (2)..(2): 2'-deoxy
  misc_feature (3)..(4): 2'-deoxy-2'-fluoro
  misc_feature (5)..(5): 2'-deoxy
  misc_feature (6)..(6): 2'-deoxy-2'-fluoro
  misc_feature (7)..(7): 2'-deoxy
  misc_feature (8)..(10): 2'-deoxy-2'-fluoro
  misc_feature (11)..(11): 2'-deoxy
  misc_feature (12)..(12): 2'-deoxy-2'-fluoro
  misc_feature (13)..(14): 2'-deoxy
  misc_feature (15)..(15): 2'-deoxy-2'-fluoro
  misc_feature (16)..(19): 2'-deoxy
  misc_feature (20)..(20): n stands for thymidine
  misc_feature (21)..(21): 3'-3 attached terminal deoxyabasic moeity
cgcuaugucuguaguggggnn

SEQ ID NO: 1822 - RNA, 21 nt, Artificial Sequence
  Description of Artificial Sequence:  Target Sequence
  misc_feature (1)..(1): 5'-3 attached terminal deoxyabasic moeity
  misc_feature (1)..(3): 2'-deoxy
  misc_feature (4)..(5): 2'-deoxy-2'-fluoro
  misc_feature (6)..(7): 2'-deoxy
  misc_feature (8)..(12): 2'-deoxy-2'-fluoro
  misc_feature (13)..(15): 2'-deoxy
  misc_feature (16)..(16): 2'-deoxy-2'-fluoro
  misc_feature (17)..(17): 2'-deoxy
  misc_feature (18)..(18): 2'-deoxy-2'-fluoro
  misc_feature (19)..(19): 2'-deoxy
  misc_feature (20)..(20): n stands for thymidine
  misc_feature (21)..(21): 3'-3 attached terminal deoxyabasic moeity
gagcugacccucaaauacgnn

SEQ ID NO: 1823 - RNA, 21 nt, Artificial Sequence
  Description of Artificial Sequence:  Target Sequence
  misc_feature (1)..(1): 5'-3 attached terminal deoxyabasic moeity
  misc_feature (1)..(1): 2'-deoxy-2'-fluoro
  misc_feature (2)..(3): 2'-deoxy
  misc_feature (4)..(4): 2'-deoxy-2'-fluoro
  misc_feature (5)..(5): 2'-deoxy
  misc_feature (6)..(8): 2'-deoxy-2'-fluoro
  misc_feature (9)..(9): 2'-deoxy
  misc_feature (10)..(11): 2'-deoxy-2'-fluoro
  misc_feature (12)..(16): 2'-deoxy
  misc_feature (17)..(17): 2'-deoxy-2'-fluoro
  misc_feature (18)..(18): 2'-deoxy
  misc_feature (19)..(19): 2'-deoxy-2'-fluoro
  misc_feature (20)..(20): n stands for thymidine
  misc_feature (21)..(21): 3'-3 attached terminal deoxyabasic moeity
cgacauucacugaggacacnn

SEQ ID NO: 1824 - RNA, 21 nt, Artificial Sequence
  Description of Artificial Sequence:  Target Sequence
  misc_feature (1)..(1): 5'-3 attached terminal deoxyabasic moeity
  misc_feature (1)..(1): 2'-deoxy
  misc_feature (2)..(4): 2'-deoxy-2'-fluoro
  misc_feature (5)..(8): 2'-deoxy
  misc_feature (9)..(11): 2'-deoxy-2'-fluoro
  misc_feature (12)..(12): 2'-deoxy
  misc_feature (13)..(13): 2'-deoxy-2'-fluoro
  misc_feature (14)..(15): 2'-deoxy
  misc_feature (16)..(16): 2'-deoxy-2'-fluoro
  misc_feature (17)..(17): 2'-deoxy
  misc_feature (18)..(18): 2'-deoxy-2'-fluoro
  misc_feature (19)..(19): 2'-deoxy
  misc_feature (20)..(20): n stands for thymidine
  misc_feature (21)..(21): 3'-3 attached terminal deoxyabasic moeity
gcucaagaccuacaaugugnn

SEQ ID NO: 1825 - RNA, 21 nt, Artificial Sequence
  Description of Artificial Sequence:  Target Sequence
  misc_feature (1)..(1): 5'-3 attached terminal deoxyabasic moeity
  misc_feature (1)..(2): 2'-deoxy-2'-fluoro
  misc_feature (3)..(3): 2'-deoxy
  misc_feature (4)..(4): 2'-deoxy-2'-fluoro
  misc_feature (5)..(6): 2'-deoxy
  misc_feature (7)..(7): 2'-deoxy-2'-fluoro
  misc_feature (8)..(8): 2'-deoxy
  misc_feature (9)..(9): 2'-deoxy-2'-fluoro
  misc_feature (10)..(11): 2'-deoxy
  misc_feature (12)..(13): 2'-deoxy-2'-fluoro
  misc_feature (14)..(14): 2'-deoxy
  misc_feature (15)..(15): 2'-deoxy-2'-fluoro
  misc_feature (16)..(18): 2'-deoxy
  misc_feature (19)..(19): 2'-deoxy-2'-fluoro
  misc_feature (20)..(20): n stands for thymidine
  misc_feature (21)..(21): 3'-3 attached terminal deoxyabasic moeity
cuacaauguggccauggacnn

SEQ ID NO: 1826 - RNA, 21 nt, Artificial Sequence
  Description of Artificial Sequence:  Target Sequence
  misc_feature (1)..(1): 5'-3 attached terminal deoxyabasic moeity
  misc_feature (1)..(1): 2'-deoxy
  misc_feature (2)..(2): 2'-deoxy-2'-fluoro
  misc_feature (3)..(3): 2'-deoxy
  misc_feature (4)..(8): 2'-deoxy-2'-fluoro
  misc_feature (9)..(10): 2'-deoxy
  misc_feature (11)..(11): 2'-deoxy-2'-fluoro
  misc_feature (12)..(12): 2'-deoxy
  misc_feature (13)..(16): 2'-deoxy-2'-fluoro
  misc_feature (17)..(17): 2'-deoxy
  misc_feature (18)..(19): 2'-deoxy-2'-fluoro
  misc_feature (20)..(20): n stands for thymidine
  misc_feature (21)..(21): 3'-3 attached terminal deoxyabasic moeity
guguucccaaugcuuugucnn

SEQ ID NO: 1827 - RNA, 21 nt, Artificial Sequence
  Description of Artificial Sequence:  Target Sequence
  misc_feature (1)..(4): 2'-deoxy-2'-fluoro
  misc_feature (5)..(6): 2'-deoxy
  misc_feature (7)..(13): 2'-deoxy-2'-fluoro
  misc_feature (14)..(14): 2'-deoxy
  misc_feature (15)..(16): 2'-deoxy-2'-fluoro
  misc_feature (17)..(18): 2'-deoxy
  misc_feature (19)..(19): 2'-deoxy-2'-fluoro
  misc_feature (20)..(20): Phosphorothioate 3'-Internucleotide Linkage
  misc_feature (21)..(21): n stands for thymidine
ccucaguuucuucaucagunn

SEQ ID NO: 1828 - RNA, 21 nt, Artificial Sequence
  Description of Artificial Sequence:  Target Sequence
  misc_feature (1)..(2): 2'-deoxy
  misc_feature (3)..(3): 2'-deoxy-2'-fluoro
  misc_feature (4)..(6): 2'-deoxy
  misc_feature (7)..(7): 2'-deoxy-2'-fluoro
  misc_feature (8)..(9): 2'-deoxy
  misc_feature (10)..(10): 2'-deoxy-2'-fluoro
  misc_feature (11)..(11): 2'-deoxy
  misc_feature (12)..(17): 2'-deoxy-2'-fluoro
  misc_feature (18)..(19): 2'-deoxy
  misc_feature (20)..(20): Phosphorothioate 3'-Internucleotide Linkage
  misc_feature (21)..(21): n stands for thymidine
aaugaaugaugcucccuggnn

SEQ ID NO: 1829 - RNA, 21 nt, Artificial Sequence
  Description of Artificial Sequence:  Target Sequence
  misc_feature (1)..(4): 2'-deoxy-2'-fluoro
  misc_feature (5)..(5): 2'-deoxy
  misc_feature (6)..(7): 2'-deoxy-2'-fluoro
  misc_feature (8)..(8): 2'-deoxy
  misc_feature (9)..(9): 2'-deoxy-2'-fluoro
  misc_feature (10)..(12): 2'-deoxy
  misc_feature (13)..(13): 2'-deoxy-2'-fluoro
  misc_feature (14)..(14): 2'-deoxy
  misc_feature (15)..(15): 2'-deoxy-2'-fluoro
  misc_feature (16)..(17): 2'-deoxy
  misc_feature (18)..(18): 2'-deoxy-2'-fluoro
  misc_feature (19)..(19): 2'-deoxy
  misc_feature (20)..(20): Phosphorothioate 3'-Internucleotide Linkage
  misc_feature (21)..(21): n stands for thymidine
ccccacuacagacauagcgnn

SEQ ID NO: 1830 - RNA, 21 nt, Artificial Sequence
  Description of Artificial Sequence:  Target Sequence
  misc_feature (1)..(1): 2'-deoxy-2'-fluoro
  misc_feature (2)..(2): 2'-deoxy
  misc_feature (3)..(3): 2'-deoxy-2'-fluoro
  misc_feature (4)..(4): 2'-deoxy
  misc_feature (5)..(7): 2'-deoxy-2'-fluoro
  misc_feature (8)..(12): 2'-deoxy
  misc_feature (13)..(14): 2'-deoxy-2'-fluoro
  misc_feature (15)..(16): 2'-deoxy
  misc_feature (17)..(19): 2'-deoxy-2'-fluoro
  misc_feature (20)..(20): Phosphorothioate 3'-Internucleotide Linkage
  misc_feature (21)..(21): n stands for thymidine
cguauuugagggucagcucnn

SEQ ID NO: 1831 - RNA, 21 nt, Artificial Sequence
  Description of Artificial Sequence:  Target Sequence
  misc_feature (1)..(1): 2'-deoxy
  misc_feature (2)..(2): 2'-deoxy-2'-fluoro
  misc_feature (3)..(3): 2'-deoxy
  misc_feature (4)..(8): 2'-deoxy-2'-fluoro
  misc_feature (9)..(10): 2'-deoxy
  misc_feature (11)..(11): 2'-deoxy-2'-fluoro
  misc_feature (12)..(14): 2'-deoxy
  misc_feature (15)..(15): 2'-deoxy-2'-fluoro
  misc_feature (16)..(16): 2'-deoxy
  misc_feature (17)..(18): 2'-deoxy-2'-fluoro
  misc_feature (19)..(19): 2'-deoxy
  misc_feature (20)..(20): Phosphorothioate 3'-Internucleotide Linkage
  misc_feature (21)..(21): n stands for thymidine
guguccucagugaaugucgnn

SEQ ID NO: 1832 - RNA, 21 nt, Artificial Sequence
  Description of Artificial Sequence:  Target Sequence
  misc_feature (1)..(1): 2'-deoxy-2'-fluoro
  misc_feature (2)..(2): 2'-deoxy
  misc_feature (3)..(3): 2'-deoxy-2'-fluoro
  misc_feature (4)..(4): 2'-deoxy
  misc_feature (5)..(6): 2'-deoxy-2'-fluoro
  misc_feature (7)..(7): 2'-deoxy
  misc_feature (8)..(8): 2'-deoxy-2'-fluoro
  misc_feature (9)..(11): 2'-deoxy
  misc_feature (12)..(15): 2'-deoxy-2'-fluoro
  misc_feature (16)..(18): 2'-deoxy
  misc_feature (19)..(19): 2'-deoxy-2'-fluoro
  misc_feature (20)..(20): Phosphorothioate 3'-Internucleotide Linkage
  misc_feature (21)..(21): n stands for thymidine
cacauuguaggucuugagcnn

SEQ ID NO: 1833 - RNA, 21 nt, Artificial Sequence
  Description of Artificial Sequence:  Target Sequence
  misc_feature (1)..(1): 2'-deoxy
  misc_feature (2)..(4): 2'-deoxy-2'-fluoro
  misc_feature (5)..(5): 2'-deoxy
  misc_feature (6)..(6): 2'-deoxy-2'-fluoro
  misc_feature (7)..(8): 2'-deoxy
  misc_feature (9)..(10): 2'-deoxy-2'-fluoro
  misc_feature (11)..(11): 2'-deoxy
  misc_feature (12)..(12): 2'-deoxy-2'-fluoro
  misc_feature (13)..(13): 2'-deoxy
  misc_feature (14)..(15): 2'-deoxy-2'-fluoro
  misc_feature (16)..(16): 2'-deoxy
  misc_feature (17)..(17): 2'-deoxy-2'-fluoro
  misc_feature (18)..(19): 2'-deoxy
  misc_feature (20)..(20): Phosphorothioate 3'-Internucleotide Linkage
  misc_feature (21)..(21): n stands for thymidine
guccauggccacauuguagnn

SEQ ID NO: 1834 - RNA, 21 nt, Artificial Sequence
  Description of Artificial Sequence:  Target Sequence
  misc_feature (1)..(2): 2'-deoxy
  misc_feature (3)..(3): 2'-deoxy-2'-fluoro
  misc_feature (4)..(7): 2'-deoxy
  misc_feature (8)..(8): 2'-deoxy-2'-fluoro
  misc_feature (9)..(9): 2'-deoxy
  misc_feature (10)..(11): 2'-deoxy-2'-fluoro
  misc_feature (12)..(16): 2'-deoxy
  misc_feature (17)..(17): 2'-deoxy-2'-fluoro
  misc_feature (18)..(18): 2'-deoxy
  misc_feature (19)..(19): 2'-deoxy-2'-fluoro
  misc_feature (20)..(20): Phosphorothioate 3'-Internucleotide Linkage
  misc_feature (21)..(21): n stands for thymidine
gacaaagcauugggaacacnn

SEQ ID NO: 1835 - RNA, 21 nt, Artificial Sequence
  Description of Artificial Sequence:  Target Sequence
  misc_feature (1)..(1): 5'-3 attached terminal deoxyabasic moeity
  misc_feature (1)..(1): 2'-O-methyl
  misc_feature (2)..(3): 2'-deoxy-2'-fluoro
  misc_feature (4)..(5): 2'-O-methyl
  misc_feature (6)..(6): 2'-deoxy-2'-fluoro
  misc_feature (7)..(13): 2'-O-methyl
  misc_feature (14)..(15): 2'-deoxy-2'-fluoro
  misc_feature (16)..(19): 2'-O-methyl
  misc_feature (20)..(20): n stands for thymidine
  misc_feature (21)..(21): 3'-3 attached terminal deoxyabasic moeity
acugaugaagaaacugaggnn

SEQ ID NO: 1836 - RNA, 21 nt, Artificial Sequence
  Description of Artificial Sequence:  Target Sequence
  misc_feature (1)..(1): 5'-3 attached terminal deoxyabasic moeity
  misc_feature (1)..(2): 2'-deoxy-2'-fluoro
  misc_feature (3)..(8): 2'-O-methyl
  misc_feature (9)..(9): 2'-deoxy-2'-fluoro
  misc_feature (10)..(10): 2'-O-methyl
  misc_feature (11)..(12): 2'-deoxy-2'-fluoro
  misc_feature (13)..(13): 2'-O-methyl
  misc_feature (14)..(16): 2'-deoxy-2'-fluoro
  misc_feature (17)..(17): 2'-O-methyl
  misc_feature (18)..(19): 2'-deoxy-2'-fluoro
  misc_feature (20)..(20): n stands for thymidine
  misc_feature (21)..(21): 3'-3 attached terminal deoxyabasic moeity
ccagggagcaucauucauunn

SEQ ID NO: 1837 - RNA, 21 nt, Artificial Sequence
  Description of Artificial Sequence:  Target Sequence
  misc_feature (1)..(1): 5'-3 attached terminal deoxyabasic moeity
  misc_feature (1)..(1): 2'-deoxy-2'-fluoro
  misc_feature (2)..(2): 2'-O-methyl
  misc_feature (3)..(4): 2'-deoxy-2'-fluoro
  misc_feature (5)..(5): 2'-O-methyl
  misc_feature (6)..(6): 2'-deoxy-2'-fluoro
  misc_feature (7)..(7): 2'-O-methyl
  misc_feature (8)..(10): 2'-deoxy-2'-fluoro
  misc_feature (11)..(11): 2'-O-methyl
  misc_feature (12)..(12): 2'-deoxy-2'-fluoro
  misc_feature (13)..(14): 2'-O-methyl
  misc_feature (15)..(15): 2'-deoxy-2'-fluoro
  misc_feature (16)..(19): 2'-O-methyl
  misc_feature (20)..(20): n stands for thymidine
  misc_feature (21)..(21): 3'-3 attached terminal deoxyabasic moeity
cgcuaugucuguaguggggnn

SEQ ID NO: 1838 - RNA, 21 nt, Artificial Sequence
  Description of Artificial Sequence:  Target Sequence
  misc_feature (1)..(1): 5'-3 attached terminal deoxyabasic moeity
  misc_feature (1)..(3): 2'-O-methyl
  misc_feature (4)..(5): 2'-deoxy-2'-fluoro
  misc_feature (6)..(7): 2'-O-methyl
  misc_feature (8)..(12): 2'-deoxy-2'-fluoro
  misc_feature (13)..(15): 2'-O-methyl
  misc_feature (16)..(16): 2'-deoxy-2'-fluoro
  misc_feature (17)..(17): 2'-O-methyl
  misc_feature (18)..(18): 2'-deoxy-2'-fluoro
  misc_feature (19)..(19): 2'-O-methyl
  misc_feature (20)..(20): n stands for thymidine
  misc_feature (21)..(21): 3'-3 attached terminal deoxyabasic moeity
gagcugacccucaaauacgnn

SEQ ID NO: 1839 - RNA, 21 nt, Artificial Sequence
  Description of Artificial Sequence:  Target Sequence
  misc_feature (1)..(1): 5'-3 attached terminal deoxyabasic moeity
  misc_feature (1)..(1): 2'-deoxy-2'-fluoro
  misc_feature (2)..(3): 2'-O-methyl
  misc_feature (4)..(4): 2'-deoxy-2'-fluoro
  misc_feature (5)..(5): 2'-O-methyl
  misc_feature (6)..(8): 2'-deoxy-2'-fluoro
  misc_feature (9)..(9): 2'-O-methyl
  misc_feature (10)..(11): 2'-deoxy-2'-fluoro
  misc_feature (12)..(16): 2'-O-methyl
  misc_feature (17)..(17): 2'-deoxy-2'-fluoro
  misc_feature (18)..(18): 2'-O-methyl
  misc_feature (19)..(19): 2'-deoxy-2'-fluoro
  misc_feature (20)..(20): n stands for thymidine
  misc_feature (21)..(21): 3'-3 attached terminal deoxyabasic moeity
cgacauucacugaggacacnn

SEQ ID NO: 1840 - RNA, 21 nt, Artificial Sequence
  Description of Artificial Sequence:  Target Sequence
  misc_feature (1)..(1): 5'-3 attached terminal deoxyabasic moeity
  misc_feature (1)..(1): 2'-O-methyl
  misc_feature (2)..(4): 2'-deoxy-2'-fluoro
  misc_feature (5)..(8): 2'-O-methyl
  misc_feature (9)..(11): 2'-deoxy-2'-fluoro
  misc_feature (12)..(12): 2'-O-methyl
  misc_feature (13)..(13): 2'-deoxy-2'-fluoro
  misc_feature (14)..(15): 2'-O-methyl
  misc_feature (16)..(16): 2'-deoxy-2'-fluoro
  misc_feature (17)..(17): 2'-O-methyl
  misc_feature (18)..(18): 2'-deoxy-2'-fluoro
  misc_feature (19)..(19): 2'-O-methyl
  misc_feature (20)..(20): n stands for thymidine
  misc_feature (21)..(21): 3'-3 attached terminal deoxyabasic moeity
gcucaagaccuacaaugugnn

SEQ ID NO: 1841 - RNA, 21 nt, Artificial Sequence
  Description of Artificial Sequence:  Target Sequence
  misc_feature (1)..(1): 5'-3 attached terminal deoxyabasic moeity
  misc_feature (1)..(2): 2'-deoxy-2'-fluoro
  misc_feature (3)..(3): 2'-O-methyl
  misc_feature (4)..(4): 2'-deoxy-2'-fluoro
  misc_feature (5)..(6): 2'-O-methyl
  misc_feature (7)..(7): 2'-deoxy-2'-fluoro
  misc_feature (8)..(8): 2'-O-methyl
  misc_feature (9)..(9): 2'-deoxy-2'-fluoro
  misc_feature (10)..(11): 2'-O-methyl
  misc_feature (12)..(13): 2'-deoxy-2'-fluoro
  misc_feature (14)..(14): 2'-O-methyl
  misc_feature (15)..(15): 2'-deoxy-2'-fluoro
  misc_feature (16)..(18): 2'-O-methyl
  misc_feature (19)..(19): 2'-deoxy-2'-fluoro
  misc_feature (20)..(20): n stands for thymidine
  misc_feature (21)..(21): 3'-3 attached terminal deoxyabasic moeity
cuacaauguggccauggacnn

SEQ ID NO: 1842 - RNA, 21 nt, Artificial Sequence
  Description of Artificial Sequence:  Target Sequence
  misc_feature (1)..(1): 5'-3 attached terminal deoxyabasic moeity
  misc_feature (1)..(1): 2'-O-methyl
  misc_feature (2)..(2): 2'-deoxy-2'-fluoro
  misc_feature (3)..(3): 2'-O-methyl
  misc_feature (4)..(8): 2'-deoxy-2'-fluoro
  misc_feature (9)..(10): 2'-O-methyl
  misc_feature (11)..(11): 2'-deoxy-2'-fluoro
  misc_feature (12)..(12): 2'-O-methyl
  misc_feature (13)..(16): 2'-deoxy-2'-fluoro
  misc_feature (17)..(17): 2'-O-methyl
  misc_feature (18)..(19): 2'-deoxy-2'-fluoro
  misc_feature (20)..(20): n stands for thymidine
  misc_feature (21)..(21): 3'-3 attached terminal deoxyabasic moeity
guguucccaaugcuuugucnn

SEQ ID NO: 1843 - RNA, 21 nt, Artificial Sequence
  Description of Artificial Sequence:  Target Sequence
  misc_feature (1)..(4): 2'-deoxy-2'-fluoro
  misc_feature (5)..(6): 2'-O-methyl
  misc_feature (7)..(13): 2'-deoxy-2'-fluoro
  misc_feature (14)..(14): 2'-O-methyl
  misc_feature (15)..(16): 2'-deoxy-2'-fluoro
  misc_feature (17)..(18): 2'-O-methyl
  misc_feature (19)..(19): 2'-deoxy-2'-fluoro
  misc_feature (20)..(20): Phosphorothioate 3'-Internucleotide Linkage
  misc_feature (21)..(21): n stands for thymidine
ccucaguuucuucaucagunn

SEQ ID NO: 1844 - RNA, 21 nt, Artificial Sequence
  Description of Artificial Sequence:  Target Sequence
  misc_feature (1)..(2): 2'-O-methyl
  misc_feature (3)..(3): 2'-deoxy-2'-fluoro
  misc_feature (4)..(6): 2'-O-methyl
  misc_feature (7)..(7): 2'-deoxy-2'-fluoro
  misc_feature (8)..(9): 2'-O-methyl
  misc_feature (10)..(10): 2'-deoxy-2'-fluoro
  misc_feature (11)..(11): 2'-O-methyl
  misc_feature (12)..(17): 2'-deoxy-2'-fluoro
  misc_feature (18)..(19): 2'-O-methyl
  misc_feature (20)..(20): Phosphorothioate 3'-Internucleotide Linkage
  misc_feature (21)..(21): n stands for thymidine
aaugaaugaugcucccuggnn

SEQ ID NO: 1845 - RNA, 21 nt, Artificial Sequence
  Description of Artificial Sequence:  Target Sequence
  misc_feature (1)..(4): 2'-deoxy-2'-fluoro
  misc_feature (5)..(5): 2'-O-methyl
  misc_feature (6)..(7): 2'-deoxy-2'-fluoro
  misc_feature (8)..(8): 2'-O-methyl
  misc_feature (9)..(9): 2'-deoxy-2'-fluoro
  misc_feature (10)..(12): 2'-O-methyl
  misc_feature (13)..(13): 2'-deoxy-2'-fluoro
  misc_feature (14)..(14): 2'-O-methyl
  misc_feature (15)..(15): 2'-deoxy-2'-fluoro
  misc_feature (16)..(17): 2'-O-methyl
  misc_feature (18)..(18): 2'-deoxy-2'-fluoro
  misc_feature (19)..(19): 2'-O-methyl
  misc_feature (20)..(20): Phosphorothioate 3'-Internucleotide Linkage
  misc_feature (21)..(21): n stands for thymidine
ccccacuacagacauagcgnn

SEQ ID NO: 1846 - RNA, 21 nt, Artificial Sequence
  Description of Artificial Sequence:  Target Sequence
  misc_feature (1)..(1): 2'-deoxy-2'-fluoro
  misc_feature (2)..(2): 2'-O-methyl
  misc_feature (3)..(3): 2'-deoxy-2'-fluoro
  misc_feature (4)..(4): 2'-O-methyl
  misc_feature (5)..(7): 2'-deoxy-2'-fluoro
  misc_feature (8)..(12): 2'-O-methyl
  misc_feature (13)..(14): 2'-deoxy-2'-fluoro
  misc_feature (15)..(16): 2'-O-methyl
  misc_feature (17)..(19): 2'-deoxy-2'-fluoro
  misc_feature (20)..(20): Phosphorothioate 3'-Internucleotide Linkage
  misc_feature (21)..(21): n stands for thymidine
cguauuugagggucagcucnn

SEQ ID NO: 1847 - RNA, 21 nt, Artificial Sequence
  Description of Artificial Sequence:  Target Sequence
  misc_feature (1)..(1): 2'-O-methyl
  misc_feature (2)..(2): 2'-deoxy-2'-fluoro
  misc_feature (3)..(3): 2'-O-methyl
  misc_feature (4)..(8): 2'-deoxy-2'-fluoro
  misc_feature (9)..(10): 2'-O-methyl
  misc_feature (11)..(11): 2'-deoxy-2'-fluoro
  misc_feature (12)..(14): 2'-O-methyl
  misc_feature (15)..(15): 2'-deoxy-2'-fluoro
  misc_feature (16)..(16): 2'-O-methyl
  misc_feature (17)..(18): 2'-deoxy-2'-fluoro
  misc_feature (19)..(19): 2'-O-methyl
  misc_feature (20)..(20): Phosphorothioate 3'-Internucleotide Linkage
  misc_feature (21)..(21): n stands for thymidine
guguccucagugaaugucgnn

SEQ ID NO: 1848 - RNA, 21 nt, Artificial Sequence
  Description of Artificial Sequence:  Target Sequence
  misc_feature (1)..(1): 2'-deoxy-2'-fluoro
  misc_feature (2)..(2): 2'-O-methyl
  misc_feature (3)..(3): 2'-deoxy-2'-fluoro
  misc_feature (4)..(4): 2'-O-methyl
  misc_feature (5)..(6): 2'-deoxy-2'-fluoro
  misc_feature (7)..(7): 2'-O-methyl
  misc_feature (8)..(8): 2'-deoxy-2'-fluoro
  misc_feature (9)..(11): 2'-O-methyl
  misc_feature (12)..(15): 2'-deoxy-2'-fluoro
  misc_feature (16)..(18): 2'-O-methyl
  misc_feature (19)..(19): 2'-deoxy-2'-fluoro
  misc_feature (20)..(20): Phosphorothioate 3'-Internucleotide Linkage
  misc_feature (21)..(21): n stands for thymidine
cacauuguaggucuugagcnn

SEQ ID NO: 1849 - RNA, 21 nt, Artificial Sequence
  Description of Artificial Sequence:  Target Sequence
  misc_feature (1)..(1): 2'-O-methyl
  misc_feature (2)..(4): 2'-deoxy-2'-fluoro
  misc_feature (5)..(5): 2'-O-methyl
  misc_feature (6)..(6): 2'-deoxy-2'-fluoro
  misc_feature (7)..(8): 2'-O-methyl
  misc_feature (9)..(10): 2'-deoxy-2'-fluoro
  misc_feature (11)..(11): 2'-O-methyl
  misc_feature (12)..(12): 2'-deoxy-2'-fluoro
  misc_feature (13)..(13): 2'-O-methyl
  misc_feature (14)..(15): 2'-deoxy-2'-fluoro
  misc_feature (16)..(16): 2'-O-methyl
  misc_feature (17)..(17): 2'-deoxy-2'-fluoro
  misc_feature (18)..(19): 2'-O-methyl
  misc_feature (20)..(20): Phosphorothioate 3'-Internucleotide Linkage
  misc_feature (21)..(21): n stands for thymidine
guccauggccacauuguagnn

SEQ ID NO: 1850 - RNA, 21 nt, Artificial Sequence
  Description of Artificial Sequence:  Target Sequence
  misc_feature (1)..(2): 2'-O-methyl
  misc_feature (3)..(3): 2'-deoxy-2'-fluoro
  misc_feature (4)..(7): 2'-O-methyl
  misc_feature (8)..(8): 2'-deoxy-2'-fluoro
  misc_feature (9)..(9): 2'-O-methyl
  misc_feature (10)..(11): 2'-deoxy-2'-fluoro
  misc_feature (12)..(16): 2'-O-methyl
  misc_feature (17)..(17): 2'-deoxy-2'-fluoro
  misc_feature (18)..(18): 2'-O-methyl
  misc_feature (19)..(19): 2'-deoxy-2'-fluoro
  misc_feature (20)..(20): Phosphorothioate 3'-Internucleotide Linkage
  misc_feature (21)..(21): n stands for thymidine
gacaaagcauugggaacacnn

SEQ ID NO: 1851 - RNA, 21 nt, Artificial Sequence
  Description of Artificial Sequence:  Target Sequence
  misc_feature (1)..(1): 5'-3 attached terminal deoxyabasic moeity
  misc_feature (20)..(20): n stands for thymidine
  misc_feature (21)..(21): 3'-3 attached terminal deoxyabasic moeity
acugaugaagaaacugaggnn

SEQ ID NO: 1852 - RNA, 21 nt, Artificial Sequence
  Description of Artificial Sequence:  Target Sequence
  misc_feature (1)..(1): 5'-3 attached terminal deoxyabasic moeity
  misc_feature (20)..(20): n stands for thymidine
  misc_feature (21)..(21): 3'-3 attached terminal deoxyabasic moeity
ccagggagcaucauucauunn

SEQ ID NO: 1853 - RNA, 21 nt, Artificial Sequence
  Description of Artificial Sequence:  Target Sequence
  misc_feature (1)..(1): 5'-3 attached terminal deoxyabasic moeity
  misc_feature (20)..(20): n stands for thymidine
  misc_feature (21)..(21): 3'-3 attached terminal deoxyabasic moeity
cgcuaugucuguaguggggnn

SEQ ID NO: 1854 - RNA, 21 nt, Artificial Sequence
  Description of Artificial Sequence:  Target Sequence
  misc_feature (1)..(1): 5'-3 attached terminal deoxyabasic moeity
  misc_feature (20)..(20): n stands for thymidine
  misc_feature (21)..(21): 3'-3 attached terminal deoxyabasic moeity
gagcugacccucaaauacgnn

SEQ ID NO: 1855 - RNA, 21 nt, Artificial Sequence
  Description of Artificial Sequence:  Target Sequence
  misc_feature (1)..(1): 5'-3 attached terminal deoxyabasic moeity
  misc_feature (20)..(20): n stands for thymidine
  misc_feature (21)..(21): 3'-3 attached terminal deoxyabasic moeity
cgacauucacugaggacacnn

SEQ ID NO: 1856 - RNA, 21 nt, Artificial Sequence
  Description of Artificial Sequence:  Target Sequence
  misc_feature (1)..(1): 5'-3 attached terminal deoxyabasic moeity
  misc_feature (20)..(20): n stands for thymidine
  misc_feature (21)..(21): 3'-3 attached terminal deoxyabasic moeity
gcucaagaccuacaaugugnn

SEQ ID NO: 1857 - RNA, 21 nt, Artificial Sequence
  Description of Artificial Sequence:  Target Sequence
  misc_feature (1)..(1): 5'-3 attached terminal deoxyabasic moeity
  misc_feature (20)..(20): n stands for thymidine
  misc_feature (21)..(21): 3'-3 attached terminal deoxyabasic moeity
cuacaauguggccauggacnn

SEQ ID NO: 1858 - RNA, 21 nt, Artificial Sequence
  Description of Artificial Sequence:  Target Sequence
  misc_feature (1)..(1): 5'-3 attached terminal deoxyabasic moeity
  misc_feature (20)..(20): n stands for thymidine
  misc_feature (21)..(21): 3'-3 attached terminal deoxyabasic moeity
guguucccaaugcuuugucnn

SEQ ID NO: 1859 - RNA, 21 nt, Artificial Sequence
  Description of Artificial Sequence:  Target Sequence
  misc_feature (20)..(20): Phosphorothioate 3'-Internucleotide Linkage
  misc_feature (21)..(21): n stands for thymidine
ccucaguuucuucaucagunn

SEQ ID NO: 1860 - RNA, 21 nt, Artificial Sequence
  Description of Artificial Sequence:  Target Sequence
  misc_feature (20)..(20): Phosphorothioate 3'-Internucleotide Linkage
  misc_feature (21)..(21): n stands for thymidine
aaugaaugaugcucccuggnn

SEQ ID NO: 1861 - RNA, 21 nt, Artificial Sequence
  Description of Artificial Sequence:  Target Sequence
  misc_feature (20)..(20): Phosphorothioate 3'-Internucleotide Linkage
  misc_feature (21)..(21): n stands for thymidine
ccccacuacagacauagcgnn

SEQ ID NO: 1862 - RNA, 21 nt, Artificial Sequence
  Description of Artificial Sequence:  Target Sequence
  misc_feature (20)..(20): Phosphorothioate 3'-Internucleotide Linkage
  misc_feature (21)..(21): n stands for thymidine
cguauuugagggucagcucnn

SEQ ID NO: 1863 - RNA, 21 nt, Artificial Sequence
  Description of Artificial Sequence:  Target Sequence
  misc_feature (20)..(20): Phosphorothioate 3'-Internucleotide Linkage
  misc_feature (21)..(21): n stands for thymidine
guguccucagugaaugucgnn

SEQ ID NO: 1864 - RNA, 21 nt, Artificial Sequence
  Description of Artificial Sequence:  Target Sequence
  misc_feature (20)..(20): Phosphorothioate 3'-Internucleotide Linkage
  misc_feature (21)..(21): n stands for thymidine
cacauuguaggucuugagcnn

SEQ ID NO: 1865 - RNA, 21 nt, Artificial Sequence
  Description of Artificial Sequence:  Target Sequence
  misc_feature (20)..(20): Phosphorothioate 3'-Internucleotide Linkage
  misc_feature (21)..(21): n stands for thymidine
guccauggccacauuguagnn

SEQ ID NO: 1866 - RNA, 21 nt, Artificial Sequence
  Description of Artificial Sequence:  Target Sequence
  misc_feature (20)..(20): Phosphorothioate 3'-Internucleotide Linkage
  misc_feature (21)..(21): n stands for thymidine
gacaaagcauugggaacacnn

SEQ ID NO: 1867 - RNA, 21 nt, Artificial Sequence
  Description of Artificial Sequence:  Target Sequence
  misc_feature (1)..(4): 2'-deoxy-2'-fluoro
  misc_feature (5)..(6): 2'-O-methyl
  misc_feature (7)..(13): 2'-deoxy-2'-fluoro
  misc_feature (14)..(14): 2'-O-methyl
  misc_feature (15)..(16): 2'-deoxy-2'-fluoro
  misc_feature (17)..(18): 2'-O-methyl
  misc_feature (19)..(19): 2'-deoxy-2'-fluoro
  misc_feature (20)..(20): n stands for thymidine
  misc_feature (21)..(21): 3'-3 attached terminal deoxyabasic moeity
ccucaguuucuucaucagunn

SEQ ID NO: 1868 - RNA, 21 nt, Artificial Sequence
  Description of Artificial Sequence:  Target Sequence
  misc_feature (1)..(2): 2'-O-methyl
  misc_feature (3)..(3): 2'-deoxy-2'-fluoro
  misc_feature (4)..(6): 2'-O-methyl
  misc_feature (7)..(7): 2'-deoxy-2'-fluoro
  misc_feature (8)..(9): 2'-O-methyl
  misc_feature (10)..(10): 2'-deoxy-2'-fluoro
  misc_feature (11)..(11): 2'-O-methyl
  misc_feature (12)..(17): 2'-deoxy-2'-fluoro
  misc_feature (18)..(19): 2'-O-methyl
  misc_feature (20)..(20): n stands for thymidine
  misc_feature (21)..(21): 3'-3 attached terminal deoxyabasic moeity
aaugaaugaugcucccuggnn

SEQ ID NO: 1869 - RNA, 21 nt, Artificial Sequence
  Description of Artificial Sequence:  Target Sequence
  misc_feature (1)..(4): 2'-deoxy-2'-fluoro
  misc_feature (5)..(5): 2'-O-methyl
  misc_feature (6)..(7): 2'-deoxy-2'-fluoro
  misc_feature (8)..(8): 2'-O-methyl
  misc_feature (9)..(9): 2'-deoxy-2'-fluoro
  misc_feature (10)..(12): 2'-O-methyl
  misc_feature (13)..(13): 2'-deoxy-2'-fluoro
  misc_feature (14)..(14): 2'-O-methyl
  misc_feature (15)..(15): 2'-deoxy-2'-fluoro
  misc_feature (16)..(17): 2'-O-methyl
  misc_feature (18)..(18): 2'-deoxy-2'-fluoro
  misc_feature (19)..(19): 2'-O-methyl
  misc_feature (20)..(20): n stands for thymidine
  misc_feature (21)..(21): 3'-3 attached terminal deoxyabasic moeity
ccccacuacagacauagcgnn

SEQ ID NO: 1870 - RNA, 21 nt, Artificial Sequence
  Description of Artificial Sequence:  Target Sequence
  misc_feature (1)..(1): 2'-deoxy-2'-fluoro
  misc_feature (2)..(2): 2'-O-methyl
  misc_feature (3)..(3): 2'-deoxy-2'-fluoro
  misc_feature (4)..(4): 2'-O-methyl
  misc_feature (5)..(7): 2'-deoxy-2'-fluoro
  misc_feature (8)..(12): 2'-O-methyl
  misc_feature (13)..(14): 2'-deoxy-2'-fluoro
  misc_feature (15)..(16): 2'-O-methyl
  misc_feature (17)..(19): 2'-deoxy-2'-fluoro
  misc_feature (20)..(20): n stands for thymidine
  misc_feature (21)..(21): 3'-3 attached terminal deoxyabasic moeity
cguauuugagggucagcucnn

SEQ ID NO: 1871 - RNA, 21 nt, Artificial Sequence
  Description of Artificial Sequence:  Target Sequence
  misc_feature (1)..(1): 2'-O-methyl
  misc_feature (2)..(2): 2'-deoxy-2'-fluoro
  misc_feature (3)..(3): 2'-O-methyl
  misc_feature (4)..(8): 2'-deoxy-2'-fluoro
  misc_feature (9)..(10): 2'-O-methyl
  misc_feature (11)..(11): 2'-deoxy-2'-fluoro
  misc_feature (12)..(14): 2'-O-methyl
  misc_feature (15)..(15): 2'-deoxy-2'-fluoro
  misc_feature (16)..(16): 2'-O-methyl
  misc_feature (17)..(18): 2'-deoxy-2'-fluoro
  misc_feature (19)..(19): 2'-O-methyl
  misc_feature (20)..(20): n stands for thymidine
  misc_feature (21)..(21): 3'-3 attached terminal deoxyabasic moeity
guguccucagugaaugucgnn

SEQ ID NO: 1872 - RNA, 21 nt, Artificial Sequence
  Description of Artificial Sequence:  Target Sequence
  misc_feature (1)..(1): 2'-deoxy-2'-fluoro
  misc_feature (2)..(2): 2'-O-methyl
  misc_feature (3)..(3): 2'-deoxy-2'-fluoro
  misc_feature (4)..(4): 2'-O-methyl
  misc_feature (5)..(6): 2'-deoxy-2'-fluoro
  misc_feature (7)..(7): 2'-O-methyl
  misc_feature (8)..(8): 2'-deoxy-2'-fluoro
  misc_feature (9)..(11): 2'-O-methyl
  misc_feature (12)..(15): 2'-deoxy-2'-fluoro
  misc_feature (16)..(18): 2'-O-methyl
  misc_feature (19)..(19): 2'-deoxy-2'-fluoro
  misc_feature (20)..(20): n stands for thymidine
  misc_feature (21)..(21): 3'-3 attached terminal deoxyabasic moeity
cacauuguaggucuugagcnn

SEQ ID NO: 1873 - RNA, 21 nt, Artificial Sequence
  Description of Artificial Sequence:  Target Sequence
  misc_feature (1)..(1): 2'-O-methyl
  misc_feature (2)..(4): 2'-deoxy-2'-fluoro
  misc_feature (5)..(5): 2'-O-methyl
  misc_feature (6)..(6): 2'-deoxy-2'-fluoro
  misc_feature (7)..(8): 2'-O-methyl
  misc_feature (9)..(10): 2'-deoxy-2'-fluoro
  misc_feature (11)..(11): 2'-O-methyl
  misc_feature (12)..(12): 2'-deoxy-2'-fluoro
  misc_feature (13)..(13): 2'-O-methyl
  misc_feature (14)..(15): 2'-deoxy-2'-fluoro
  misc_feature (16)..(16): 2'-O-methyl
  misc_feature (17)..(17): 2'-deoxy-2'-fluoro
  misc_feature (18)..(19): 2'-O-methyl
  misc_feature (20)..(20): n stands for thymidine
  misc_feature (21)..(21): 3'-3 attached terminal deoxyabasic moeity
guccauggccacauuguagnn

SEQ ID NO: 1874 - RNA, 21 nt, Artificial Sequence
  Description of Artificial Sequence:  Target Sequence
  misc_feature (1)..(2): 2'-O-methyl
  misc_feature (3)..(3): 2'-deoxy-2'-fluoro
  misc_feature (4)..(7): 2'-O-methyl
  misc_feature (8)..(8): 2'-deoxy-2'-fluoro
  misc_feature (9)..(9): 2'-O-methyl
  misc_feature (10)..(11): 2'-deoxy-2'-fluoro
  misc_feature (12)..(16): 2'-O-methyl
  misc_feature (17)..(17): 2'-deoxy-2'-fluoro
  misc_feature (18)..(18): 2'-O-methyl
  misc_feature (19)..(19): 2'-deoxy-2'-fluoro
  misc_feature (20)..(20): n stands for thymidine
  misc_feature (21)..(21): 3'-3 attached terminal deoxyabasic moeity
gacaaagcauugggaacacnn

SEQ ID NO: 1875 - RNA, 21 nt, Artificial Sequence
  Description of Artificial Sequence:  Target Sequence
  misc_feature (20)..(20): n stands for thymidine
  misc_feature (21)..(21): 3'-3 attached terminal deoxyabasic moeity
ccucaguuucuucaucagunn

SEQ ID NO: 1876 - RNA, 21 nt, Artificial Sequence
  Description of Artificial Sequence:  Target Sequence
  misc_feature (20)..(20): n stands for thymidine
  misc_feature (21)..(21): 3'-3 attached terminal deoxyabasic moeity
aaugaaugaugcucccuggnn

SEQ ID NO: 1877 - RNA, 21 nt, Artificial Sequence
  Description of Artificial Sequence:  Target Sequence
  misc_feature (20)..(20): n stands for thymidine
  misc_feature (21)..(21): 3'-3 attached terminal deoxyabasic moeity
ccccacuacagacauagcgnn

SEQ ID NO: 1878 - RNA, 21 nt, Artificial Sequence
  Description of Artificial Sequence:  Target Sequence
  misc_feature (20)..(20): n stands for thymidine
  misc_feature (21)..(21): 3'-3 attached terminal deoxyabasic moeity
cguauuugagggucagcucnn

SEQ ID NO: 1879 - RNA, 21 nt, Artificial Sequence
  Description of Artificial Sequence:  Target Sequence
  misc_feature (20)..(20): n stands for thymidine
  misc_feature (21)..(21): 3'-3 attached terminal deoxyabasic moeity
guguccucagugaaugucgnn

SEQ ID NO: 1880 - RNA, 21 nt, Artificial Sequence
  Description of Artificial Sequence:  Target Sequence
  misc_feature (20)..(20): n stands for thymidine
  misc_feature (21)..(21): 3'-3 attached terminal deoxyabasic moeity
cacauuguaggucuugagcnn

SEQ ID NO: 1881 - RNA, 21 nt, Artificial Sequence
  Description of Artificial Sequence:  Target Sequence
  misc_feature (20)..(20): n stands for thymidine
  misc_feature (21)..(21): 3'-3 attached terminal deoxyabasic moeity
guccauggccacauuguagnn

SEQ ID NO: 1882 - RNA, 21 nt, Artificial Sequence
  Description of Artificial Sequence:  Target Sequence
  misc_feature (20)..(20): n stands for thymidine
  misc_feature (21)..(21): 3'-3 attached terminal deoxyabasic moeity
gacaaagcauugggaacacnn

SEQ ID NO: 1883 - RNA, 21 nt, Artificial Sequence
  Description of Artificial Sequence:  siNA sense region
  misc_feature (1)..(1): 5'-3 attached terminal deoxyabasic moeity
  misc_feature (21)..(21): 3'-3 attached terminal deoxyabasic moeity
  misc_feature (20)..(21): n stands for any nucleotide
nnnnnnnnnnnnnnnnnnnnn

SEQ ID NO: 1884 - RNA, 21 nt, Artificial Sequence
  Description of Artificial Sequence:  siNA antisense region
  misc_feature (20)..(20): Phosphorothioate 3'-Internucleotide Linkage
  misc_feature (20)..(21): n stands for any nucleotide
  misc_feature (21)..(21): 3'-3 attached terminal glyceryl moeity
nnnnnnnnnnnnnnnnnnnnn

SEQ ID NO: 1885 - RNA, 21 nt, Artificial Sequence
  Description of Artificial Sequence:  siNA sense region
  misc_feature (1)..(19): n stands for any nucleotide wherein any pyrimidine nucleotide present is 2'-Fluoro and all purine nucleotide is 2'-o-methly
  misc_feature (20)..(20): Phosphorothioate 3'-Internucleotide Linkage
  misc_feature (20)..(21): n stands for any nucleotide
nnnnnnnnnnnnnnnnnnnnn

SEQ ID NO: 1886 - RNA, 21 nt, Artificial Sequence
  Description of Artificial Sequence:  siNA antisense region
  misc_feature (1)..(19): n stands for any nucleotide wherein any pyrimidine nucleotide present is 2'-Fluoro and all purine nucleotides are 2'-o-methyl
  misc_feature (20)..(20): Phosphorothioate 3'-Internucleotide Linkage
  misc_feature (20)..(21): n stands for any nucleotide
  misc_feature (21)..(21): 3'-3 attached terminal glyceryl moeity
nnnnnnnnnnnnnnnnnnnnn

SEQ ID NO: 1887 - RNA, 21 nt, Artificial Sequence
  Description of Artificial Sequence:  siNA sense region
  misc_feature (1)..(19): n stands for any nucleotide wherein any pyrimidine nucleotide present is 2'-O-methyl or 2'-Fluoro
  misc_feature (20)..(21): n stands for any nucleotide
  misc_feature (1)..(1): 5'-3 attached terminal deoxyabasic moeity
  misc_feature (21)..(21): 3'-3 attached terminal deoxyabasic moeity
nnnnnnnnnnnnnnnnnnnnn

SEQ ID NO: 1888 - RNA, 21 nt, Artificial Sequence
  Description of Artificial Sequence:  siNA antisense region
  misc_feature (1)..(19): n stands for any nucleotide wherein any pyrimidine nucleotide present is 2'-Fluoro
  misc_feature (20)..(20): Phosphorothioate 3'-Internucleotide Linkage
  misc_feature (20)..(21): n stands for any nucleotide
  misc_feature (21)..(21): 3'-3 attached terminal glyceryl moeity
nnnnnnnnnnnnnnnnnnnnn

SEQ ID NO: 1889 - RNA, 21 nt, Artificial Sequence
  Description of Artificial Sequence:  siNA sense region
  misc_feature (1)..(19): n stands for any nucleotide wherein any pyrimidine nucleotide present is 2'-Fluoro and any purine nucleotide present is 2'-Deoxy
  misc_feature (20)..(21): n stands for any nucleotide
  misc_feature (1)..(1): 5'-3 attached terminal deoxyabasic moeity
  misc_feature (21)..(21): 3'-3 attached terminal deoxyabasic moeity
nnnnnnnnnnnnnnnnnnnnn

SEQ ID NO: 1890 - RNA, 21 nt, Artificial Sequence
  Description of Artificial Sequence:  siNA sense region
  misc_feature (1)..(19): n stands for any nucleotide wherein any pyrimidine nucleotide present is 2'-Fluoro
  misc_feature (20)..(21): n stands for any nucleotide
  misc_feature (1)..(1): 5'-3 attached terminal deoxyabasic moeity
  misc_feature (21)..(21): 3'-3 attached terminal deoxyabasic moeity
nnnnnnnnnnnnnnnnnnnnn

SEQ ID NO: 1891 - RNA, 21 nt, Artificial Sequence
  Description of Artificial Sequence:  siNA antisense region
  misc_feature (1)..(19): n stands for any nucleotide wherein any pyrimidine nucleotide present is 2'-Fluoro and any purine nucleotide present is 2'-deoxy
  misc_feature (20)..(21): n stands for any nucleotide
  misc_feature (20)..(20): Phosphorothioate or Phosphorodithioate 3'-Internucleotide Linkage
  misc_feature (21)..(21): 3'-3 attached terminal glyceryl moeity
nnnnnnnnnnnnnnnnnnnnn

SEQ ID NO: 1892 - RNA, 21 nt, Artificial Sequence
  Description of Artificial Sequence:  siNA sense region
  misc_feature (1)..(1): 5'-3 attached terminal deoxyabasic moeity
  misc_feature (21)..(21): 3'-3 attached terminal deoxyabasic moeity
  misc_feature (20)..(21): n stands for thymidine
cauggcugccaucugcgccnn

SEQ ID NO: 1893 - RNA, 21 nt, Artificial Sequence
  Description of Artificial Sequence:  siNA antisense region
  misc_feature (20)..(20): Phosphorothioate or Phosphorodithioate 3'-Internucleotide Linkage
  misc_feature (20)..(21): n stands for thymidine
  misc_feature (21)..(21): 3'-3 attached terminal glyceryl moeity
ggcgcagauggcagccaugnn

SEQ ID NO: 1894 - RNA, 21 nt, Artificial Sequence
  Description of Artificial Sequence:  siNA sense region
  misc_feature (2)..(2): 2'-O-Methyl
  misc_feature (4)..(5): 2'-O-Methyl
  misc_feature (8)..(8): 2'-O-Methyl
  misc_feature (11)..(11): 2'-O-Methyl
  misc_feature (15)..(15): 2'-O-Methyl
  misc_feature (17)..(17): 2'-O-Methyl
  misc_feature (1)..(1): 2'-deoxy-2'-Fluoro
  misc_feature (3)..(3): 2'-deoxy-2'-Fluoro
  misc_feature (6)..(7): 2'-deoxy-2'-Fluoro
  misc_feature (9)..(10): 2'-deoxy-2'-Fluoro
  misc_feature (12)..(14): 2'-deoxy-2'-Fluoro
  misc_feature (16)..(16): 2'-deoxy-2'-Fluoro
  misc_feature (18)..(19): 2'-deoxy-2'-Fluoro
  misc_feature (20)..(20): Phosphorothioate or Phosphorodithioate 3'-Internucleotide Linkage
  misc_feature (20)..(21): n stands for thymidine
cauggcugccaucugcgccnn

SEQ ID NO: 1895 - RNA, 21 nt, Artificial Sequence
  Description of Artificial Sequence:  siNA antisense region
  misc_feature (1)..(2): 2'-O-Methyl
  misc_feature (4)..(4): 2'-O-Methyl
  misc_feature (6)..(8): 2'-O-Methyl
  misc_feature (10)..(11): 2'-O-Methyl
  misc_feature (13)..(14): 2'-O-Methyl
  misc_feature (17)..(17): 2'-O-Methyl
  misc_feature (19)..(19): 2'-O-Methyl
  misc_feature (3)..(3): 2'-deoxy-2'-Fluoro
  misc_feature (5)..(5): 2'-deoxy-2'-Fluoro
  misc_feature (9)..(9): 2'-deoxy-2'-Fluoro
  misc_feature (12)..(12): 2'-deoxy-2'-Fluoro
  misc_feature (15)..(16): 2'-deoxy-2'-Fluoro
  misc_feature (18)..(18): 2'-deoxy-2'-Fluoro
  misc_feature (20)..(21): n stands for thymidine
  misc_feature (20)..(20): Phosphorothioate or Phosphorodithioate 3'-Internucleotide Linkage
  misc_feature (21)..(21): 3'-3 attached terminal glyceryl moeity
ggcgcagauggcagccaugnn

SEQ ID NO: 1896 - RNA, 21 nt, Artificial Sequence
  Description of Artificial Sequence:  siNA sense region
  misc_feature (1)..(1): 2'-deoxy-2'-Fluoro
  misc_feature (3)..(3): 2'-deoxy-2'-Fluoro
  misc_feature (6)..(7): 2'-deoxy-2'-Fluoro
  misc_feature (9)..(10): 2'-deoxy-2'-Fluoro
  misc_feature (12)..(14): 2'-deoxy-2'-Fluoro
  misc_feature (16)..(16): 2'-deoxy-2'-Fluoro
  misc_feature (18)..(19): 2'-deoxy-2'-Fluoro
  misc_feature (1)..(1): 5'-3 attached terminal deoxyabasic moeity
  misc_feature (21)..(21): 3'-3 attached terminal deoxyabasic moeity
  misc_feature (20)..(21): n stands for thymidine
cauggcugccaucugcgccnn

SEQ ID NO: 1897 - RNA, 21 nt, Artificial Sequence
  Description of Artificial Sequence:  siNA antisense region
  misc_feature (3)..(3): 2'-deoxy-2'-Fluoro
  misc_feature (5)..(5): 2'-deoxy-2'-Fluoro
  misc_feature (9)..(9): 2'-deoxy-2'-Fluoro
  misc_feature (12)..(12): 2'-deoxy-2'-Fluoro
  misc_feature (15)..(16): 2'-deoxy-2'-Fluoro
  misc_feature (18)..(18): 2'-deoxy-2'-Fluoro
  misc_feature (20)..(21): n stands for thymidine
  misc_feature (20)..(20): Phosphorothioate or Phosphorodithioate 3'-Internucleotide Linkage
  misc_feature (21)..(21): 3'-3 attached terminal glyceryl moeity
ggcgcagauggcagccaugnn

SEQ ID NO: 1898 - RNA, 21 nt, Artificial Sequence
  Description of Artificial Sequence:  siNA sense region
  misc_feature (2)..(2): 2'-deoxy
  misc_feature (4)..(5): 2'-deoxy
  misc_feature (8)..(8): 2'-deoxy
  misc_feature (11)..(11): 2'-deoxy
  misc_feature (15)..(15): 2'-deoxy
  misc_feature (17)..(17): 2'-deoxy
  misc_feature (1)..(1): 2'-deoxy-2'-Fluoro
  misc_feature (3)..(3): 2'-deoxy-2'-Fluoro
  misc_feature (6)..(7): 2'-deoxy-2'-Fluoro
  misc_feature (9)..(10): 2'-deoxy-2'-Fluoro
  misc_feature (12)..(14): 2'-deoxy-2'-Fluoro
  misc_feature (16)..(16): 2'-deoxy-2'-Fluoro
  misc_feature (18)..(19): 2'-deoxy-2'-Fluoro
  misc_feature (1)..(1): 5'-3 attached terminal deoxyabasic moeity
  misc_feature (21)..(21): 3'-3 attached terminal deoxyabasic moeity
  misc_feature (20)..(21): n stands for thymidine
cauggcugccaucugcgccnn

SEQ ID NO: 1899 - RNA, 21 nt, Artificial Sequence
  Description of Artificial Sequence:  siNA sense region
  misc_feature (1)..(1): 2'-deoxy-2'-Fluoro
  misc_feature (3)..(3): 2'-deoxy-2'-Fluoro
  misc_feature (6)..(7): 2'-deoxy-2'-Fluoro
  misc_feature (9)..(10): 2'-deoxy-2'-Fluoro
  misc_feature (12)..(14): 2'-deoxy-2'-Fluoro
  misc_feature (16)..(16): 2'-deoxy-2'-Fluoro
  misc_feature (18)..(19): 2'-deoxy-2'-Fluoro
  misc_feature (1)..(1): 5'-3 attached terminal deoxyabasic moeity
  misc_feature (21)..(21): 3'-3 attached terminal deoxyabasic moeity
  misc_feature (20)..(21): n stands for thymidine
cauggcugccaucugcgccnn

SEQ ID NO: 1900 - RNA, 21 nt, Artificial Sequence
  Description of Artificial Sequence:  siNA antisense region
  misc_feature (1)..(2): 2'-deoxy
  misc_feature (4)..(4): 2'-deoxy
  misc_feature (6)..(8): 2'-deoxy
  misc_feature (10)..(11): 2'-deoxy
  misc_feature (13)..(14): 2'-deoxy
  misc_feature (17)..(17): 2'-deoxy
  misc_feature (19)..(19): 2'-deoxy
  misc_feature (3)..(3): 2'-deoxy-2'-Fluoro
  misc_feature (5)..(5): 2'-deoxy-2'-Fluoro
  misc_feature (9)..(9): 2'-deoxy-2'-Fluoro
  misc_feature (12)..(12): 2'-deoxy-2'-Fluoro
  misc_feature (15)..(16): 2'-deoxy-2'-Fluoro
  misc_feature (18)..(18): 2'-deoxy-2'-Fluoro
  misc_feature (20)..(21): n stands for thymidine
  misc_feature (20)..(20): Phosphorothioate or Phosphorodithioate 3'-Internucleotide Linkage
  misc_feature (21)..(21): 3'-3 attached terminal glyceryl moeity
ggcgcagauggcagccaugnn

SEQ ID NO: 1901 - RNA, 14 nt, Artificial Sequence
  Description of Artificial Sequence:  Target Sequence
auauaucuauuucg

SEQ ID NO: 1902 - RNA, 14 nt, Artificial Sequence
  Description of Artificial Sequence:  Complement to Target Sequence
cgaaauaguauaua

SEQ ID NO: 1903 - RNA, 22 nt, Artificial Sequence
  Description of Artificial Sequence:  appended target/complement
cgaaauaguauauacuauuucg

SEQ ID NO: 1904 - RNA, 24 nt, Artificial Sequence
  Description of Artificial Sequence:  Duplex forming oligonucleotide
  misc_feature (23)..(24): n stands for thymidine
cgaaauaguauauacuauuucgnn

1. A chemically synthesized double stranded short interfering nucleic acid (siNA) molecule that directs cleavage of an amyloid precursor protein (APP)RNA via RNA interference (RNAi), wherein:
a. each strand of said siNA molecule is about 18 to about 23 nucleotides in length; and
b. one strand of said siNA molecule comprises nucleotide sequence having sufficient complementarity to said APP RNA for the siNA molecule to direct cleavage of the APP RNA via RNA interference.

2. The siNA molecule of claim 1, wherein said siNA molecule comprises no ribonucleotides.

3. The siNA molecule of claim 1, wherein said siNA molecule comprises one or more ribonucleotides.

4. The siNA molecule of claim 1, wherein one strand of said double-stranded siNA molecule comprises a nucleotide sequence that is complementary to a nucleotide sequence of a APP gene or a portion thereof, and wherein a second strand of said double-stranded siNA molecule comprises a nucleotide sequence substantially similar to the nucleotide sequence or a portion thereof of said APP RNA.

5. The siNA molecule of claim 4, wherein each strand of the siNA molecule comprises about 18 to about 23 nucleotides, and wherein each strand comprises at least about 19 nucleotides that are complementary to the nucleotides of the other strand.

6. The siNA molecule of claim 1, wherein said siNA molecule comprises an antisense region comprising a nucleotide sequence that is complementary to a nucleotide sequence of a APP gene or a portion thereof, and wherein said siNA further comprises a sense region, wherein said sense region comprises a nucleotide sequence substantially similar to the nucleotide sequence of said APP gene or a portion thereof.

7. The siNA molecule of claim 6, wherein said antisense region and said sense region comprise about 18 to about 23 nucleotides, and wherein said antisense region comprises at least about 18 nucleotides that are complementary to nucleotides of the sense region.

8. The siNA molecule of claim 1, wherein said siNA molecule comprises a sense region and an antisense region, and wherein said antisense region comprises a nucleotide sequence that is complementary to a nucleotide sequence of RNA encoded by a APP gene, or a portion thereof, and said sense region comprises a nucleotide sequence that is complementary to said antisense region.

9. The siNA molecule of claim 6, wherein said siNA molecule is assembled from two separate oligonucleotide fragments wherein one fragment comprises the sense region and a second fragment comprises the antisense region of said siNA molecule.

10. The siNA molecule of claim 6, wherein said sense region is connected to the antisense region via a linker molecule.

11. The siNA molecule of claim 10, wherein said linker molecule is a polynucleotide linker.

12. The siNA molecule of claim 10, wherein said linker molecule is a non-nucleotide linker.

13. The siNA molecule of claim 6, wherein pyrimidine nucleotides in the sense region are 2′-O-methylpyrimidine nucleotides.

14. The siNA molecule of claim 6, wherein purine nucleotides in the sense region are 2′-deoxy purine nucleotides.

15. The siNA molecule of claim 6, wherein pyrimidine nucleotides present in the sense region are 2′-deoxy-2′-fluoro pyrimidine nucleotides.

16. The siNA molecule of claim 9, wherein the fragment comprising said sense region includes a terminal cap moiety at a 5′-end, a 3′-end, or both of the 5′ and 3′ ends of the fragment comprising said sense region.

17. The siNA molecule of claim 16, wherein said terminal cap moiety is an inverted deoxy abasic moiety.

18. The siNA molecule of claim 6, wherein pyrimidine nucleotides of said antisense region are 2′-deoxy-2′-fluoro pyrimidine nucleotides.

19. The siNA molecule of claim 6, wherein purine nucleotides of said antisense region are 2′-O-methyl purine nucleotides.

20. The siNA molecule of claim 6, wherein purine nucleotides present in said antisense region comprise 2′-deoxy-purine nucleotides.

21. The siNA molecule of claim 18, wherein said antisense region comprises a phosphorothioate internucleotide linkage at the 3′ end of said antisense region.

22. The siNA molecule of claim 6, wherein said antisense region comprises a glyceryl modification at a 3′ end of said antisense region.

23. The siNA molecule of claim 9, wherein each of the two fragments of said siNA molecule comprise about 21 nucleotides.

24. The siNA molecule of claim 23, wherein about 19 nucleotides of each fragment of the siNA molecule are base-paired to the complementary nucleotides of the other fragment of the siNA molecule and wherein at least two 3′ terminal nucleotides of each fragment of the siNA molecule are not base-paired to the nucleotides of the other fragment of the siNA molecule.

25. The siNA molecule of claim 24, wherein each of the two 3′ terminal nucleotides of each fragment of the siNA molecule are 2′-deoxy-pyrimidines.

26. The siNA molecule of claim 25, wherein said 2′-deoxy-pyrimidine is 2′-deoxy-thymidine.

27. The siNA molecule of claim 23, wherein all of the about 21 nucleotides of each fragment of the siNA molecule are base-paired to the complementary nucleotides of the other fragment of the siNA molecule.

28. The siNA molecule of claim 23, wherein about 19 nucleotides of the antisense region are base-paired to the nucleotide sequence of the RNA encoded by a APP gene or a portion thereof.

29. The siNA molecule of claim 23, wherein about 21 nucleotides of the antisense region are base-paired to the nucleotide sequence of the RNA encoded by a APP gene or a portion thereof.

30. The siNA molecule of claim 9, wherein a 5′-end of the fragment comprising said antisense region optionally includes a phosphate group.

31. A composition comprising the siNA molecule of claim 1 in an pharmaceutically acceptable carrier or diluent.

32. A siNA according to claim 1 wherein the APP RNA comprises Genbank Accession No. NM_{—}000484.

33. A siNA according to claim 1 wherein said siNA comprises any of SEQ ID NOs. 1-199, 200-398, 1463-1470, and 1495-1590.

34. A composition comprising the siNA of claim 32 together with a pharmaceutically acceptable carrier or diluent.

35. A composition comprising the siNA of claim 33 together with a pharmaceutically acceptable carrier or diluent.
